(19) United States
(12) Patent Application Publication
(10) Pub. No.: US 2012/0144529 A1
(43) Pub. Date: Jun. 7, 2012

(54) Plants Having Enhanced Yield-Related Traits and a Method for Making the Same

(75) Inventors: Ana Isabel Sanz Molinero, Gentbrugge (BE); Yves Hatzfeld, Lille (FR); Valerie Frankard, Waterloo (BE); Christophe Reuzeau, Tocan Saint Apre (FR)

(73) Assignee: BASF Plant Science Company GmbH, Ludwigshafen (DE)

(21) Appl. No.: 13/390,563

(22) PCT Filed: Aug. 11, 2010
(86) PCT No.: PCT/EP2010/061657

§ 371 Date: Feb. 15, 2012

Related U.S. Application Data
(60) Provisional application No. 61/251,306, filed on Oct. 14, 2009.
(60) Provisional application No. 61/251,307, filed on Oct. 14, 2009.
(60) Provisional application No. 61/251,309, filed on Oct. 14, 2009.
(60) Provisional application No. 61/251,311, filed on Oct. 14, 2009.
(60) Provisional application No. 61/251,308, filed on Oct. 14, 2009.
(60) Provisional application No. 61/251,312, filed on Oct. 14, 2009.

(30) Foreign Application Priority Data
Aug. 19, 2009 (EP) 09168159.3
Aug. 19, 2009 (EP) 09168166.8
Aug. 19, 2009 (EP) 09168213.8
Aug. 21, 2009 (EP) 09168392.0
Aug. 21, 2009 (EP) 09168402.7
Aug. 21, 2009 (EP) 09168433.2

(51) Int. Cl. A01H 5/00; C12N 5/10; C12N 15/82; A01H 1/00; A01H 5/10

(52) U.S. Cl. 800/287; 800/278; 800/290; 800/298; 435/320.1; 435/419; 800/320.2; 800/320.1; 800/320.3; 800/320

(57) ABSTRACT

The present invention relates generally to the field of molecular biology and concerns a method for enhancing yield-related traits in plants by modulating expression in a plant of a nucleic acid encoding a FSM1-like (Fruit Sant/Myb) polypeptide, or a PIF3-like (PHYTOCHROME INTERACTING FACTOR) polypeptide, or an Uroporphyrinogen III decarboxylase (UROD) polypeptide, or an AS-MTT (Abiotic Stress Membrane Tethered Transcription factor) polypeptide, or an EXO-1 polypeptide, or a YiAP2 (Yield increasing Apetala 2) polypeptide. The present invention also concerns plants having modulated expression of a nucleic acid encoding a FSM1-like polypeptide, which plants have enhanced yield-related traits relative to corresponding wild type plants or other control plants. The invention also provides constructs useful in the methods of the invention.

[0001] The present invention relates generally to the field of molecular biology and concerns a method for enhancing yield-related traits in plants by modulating expression in a plant of a nucleic acid encoding a FSM1-like (Fruit Sant/Myb) polypeptide. The present invention also concerns plants having modulated expression of a nucleic acid encoding a FSM1-like polypeptide, which plants have enhanced yield-related traits relative to corresponding wild type plants or other control plants. The invention also provides constructs useful in the methods of the invention.

[0002] The present invention relates generally to the field of molecular biology and concerns a method for enhancing yield-related traits in plants by modulating expression in a plant of a nucleic acid encoding a PIF3-like (PHYTOCHROME INTERACTING FACTOR) polypeptide. The present invention also concerns plants having modulated expression of a nucleic acid encoding a PIF3-like polypeptide, which plants have enhanced yield-related traits relative to corresponding wild type plants or other control plants. The invention also provides constructs useful in the methods of the invention.

[0003] The present invention relates generally to the field of molecular biology and concerns a method for enhancing yield-related traits in plants by modulating expression in a plant of a nucleic acid encoding an Uroporphyrinogen III decarboxylase (UROD) polypeptide. The present invention also concerns plants having modulated expression of a nucleic acid encoding a UROD polypeptide, which plants have enhanced yield-related traits relative to corresponding wild type plants or other control plants. The invention also provides constructs useful in the methods of the invention.

[0004] The present invention relates generally to the field of molecular biology and concerns a method for enhancing various economically important yield-related traits in plants. More specifically, the present invention concerns a method for enhancing yield-related traits in plants by modulating expression in a plant of a nucleic acid encoding an AS-MTT (Abiotic Stress Membrane Tethered Transcription factor) polypeptide. The present invention also concerns plants having modulated expression of a nucleic acid encoding an AS-MTT polypeptide, which plants have enhanced yield-related traits relative to control plants. The invention also provides constructs comprising AS-MTT-encoding nucleic acids, useful in performing the methods of the invention.

[0005] The present invention relates generally to the field of molecular biology and concerns a method for enhancing yield-related traits in plants by modulating expression in a plant of a nucleic acid encoding an EXO-1 polypeptide. The present invention also concerns plants having modulated expression of a nucleic acid encoding an EXO-1 polypeptide, which plants have enhanced yield-related traits relative to corresponding wild type plants or other control plants. The invention also provides constructs useful in the methods of the invention.

[0006] The present invention relates generally to the field of molecular biology and concerns a method for enhancing yield-related traits in plants by modulating expression in a plant of a nucleic acid encoding a YiAP2 (Yield increasing Apetala 2) polypeptide. The present invention also concerns plants having modulated expression of a nucleic acid encoding a YiAP2 polypeptide, which plants have enhanced yield-related traits relative to corresponding wild type plants or other control plants. The invention also provides constructs useful in the methods of the invention.

[0007] The ever-increasing world population and the dwindling supply of arable land available for agriculture fuels research towards increasing the efficiency of agriculture. Conventional means for crop and horticultural improvements utilise selective breeding techniques to identify plants having desirable characteristics. However, such selective breeding techniques have several drawbacks, namely that these techniques are typically labour intensive and result in plants that often contain heterogeneous genetic components that may not always result in the desirable trait being passed on from parent plants. Advances in molecular biology have allowed mankind to modify the germplasm of animals and plants. Genetic engineering of plants entails the isolation and manipulation of genetic material (typically in the form of DNA or RNA) and the subsequent introduction of that genetic material into a plant. Such technology has the capacity to deliver crops or plants having various improved economic, agronomic or horticultural traits.

[0008] A trait of particular economic interest is increased yield. Yield is normally defined as the measurable produce of economic value from a crop. This may be defined in terms of quantity and/or quality. Yield is directly dependent on several factors, for example, the number and size of the organs, plant architecture (for example, the number of branches), seed production, leaf senescence and more. Root development, nutrient uptake, stress tolerance and early vigour may also be important factors in determining yield. Optimizing the abovementioned factors may therefore contribute to increasing crop yield.

[0009] Seed yield is a particularly important trait, since the seeds of many plants are important for human and animal nutrition. Crops such as corn, rice, wheat, canola and soybean account for over half the total human caloric intake, whether through direct consumption of the seeds themselves or through consumption of meat products raised on processed seeds. They are also a source of sugars, oils and many kinds of metabolites used in industrial processes. Seeds contain an embryo (the source of new shoots and roots) and an endosperm (the source of nutrients for embryo growth during germination and during early growth of seedlings). The development of a seed involves many genes, and requires the transfer of metabolites from the roots, leaves and stems into the growing seed. The endosperm, in particular, assimilates the metabolic precursors of carbohydrates, oils and proteins and synthesizes them into storage macromolecules to fill out the grain.

[0010] Another important trait for many crops is early vigour. Improving early vigour is an important objective of modern rice breeding programs in both temperate and tropical rice cultivars. Long roots are important for proper soil anchorage in water-seeded rice. Where rice is sown directly into flooded fields, and where plants must emerge rapidly through water, longer shoots are associated with vigour. Where drill-seeding is practiced, longer mesocotyls and coleoptiles are important for good seedling emergence. The ability to engineer early vigour into plants would be of great importance in agriculture. For example, poor early vigour has been a limitation to the introduction of maize (Zea mays L.) hybrids based on Corn Belt germplasm in the European Atlantic.

[0011] A further important trait is that of improved abiotic stress tolerance. Abiotic stress is a primary cause of crop loss worldwide, reducing average yields for most major crop plants by more than 50% (Wang et al., Planta 218, 1-14, 2003). Abiotic stresses may be caused by drought, salinity, extremes of temperature, chemical toxicity and oxidative stress. The ability to improve plant tolerance to abiotic stress would be of great economic advantage to farmers worldwide and would allow for the cultivation of crops during adverse conditions and in territories where cultivation of crops may not otherwise be possible.

[0012] Crop yield may therefore be increased by optimising one of the above-mentioned factors.

[0013] Depending on the end use, the modification of certain yield traits may be favoured over others. For example for applications such as forage or wood production, or bio-fuel resource, an increase in the vegetative parts of a plant may be desirable, and for applications such as flour, starch or oil production, an increase in seed parameters may be particularly desirable. Even amongst the seed parameters, some may be favoured over others, depending on the application. Various mechanisms may contribute to increasing seed yield, whether that is in the form of increased seed size or increased seed number.

[0014] One approach to increasing yield (seed yield and/or biomass) in plants may be through modification of the inherent growth mechanisms of a plant, such as the cell cycle or various signalling pathways involved in plant growth or in defense mechanisms.

[0015] It has now been found that various yield-related traits may be improved in plants by modulating expression in a plant of a nucleic acid encoding a FSM1-like (Fruit Sant/Myb) polypeptide, or a PIF3-like (Phytochrome Interacting Factor 3) polypeptide, or a UROD (Uroporphyrinogen III decarboxylase) polypeptide, or an AS-MTT (Abiotic Stress Membrane Tethered Transcription factor) polypeptide, or an EXO-1 (Protein Of Interest) polypeptide, or a YiAP2 polypeptide, in a plant.

### BACKGROUND

[0016] 1. FSM1-like (Fruit Sant/Myb) Polypeptides

[0017] FSM1-like proteins are transcription factors characterised by the presence of a SANT/MYB domain. They were first described in tomato (Barg et al., Planta 221, 197-211, 2005); and are reportedly involved in the determination of floral symmetry (Corley et al., Proc. Natl. Acad. Sci. 102, 5068-5073, 2005). The RADIALIS protein for example, an FSM1-like protein in Antirrhinium, is expressed in the dorsal region of the floral meristem, where it interacts with CYC and DICH to control the flower asymmetry (Baxter et al. Plant J. 52, 105-113, 2007). Tomato FSM1 is expressed in the fruit during the very early developmental stages. Ectopic expression of tomato fsm1 in Arabidopsis resulted in severe developmental alterations manifested in retarded growth, and reduced apical dominance during tomato and Arabidopsis seedling development (Barg et al., 2005).

2. PIF3-like (Phytochrome Interacting Factor 3) Polypeptides

[0018] Phytochromes are dimeric chromoproteins that regulate plant responses to red (R) and far-red (FR) light. The Arabidopsis thaliana genome encodes five phytochrome apoproteins: type I phyA mediates responses to FR, and type II phyB-phyE mediate shade avoidance and classical R/FR-reversible responses. Roles in light regulation of hypocotyl length, leaf area, and flowering time are demonstrated for heterodimeric phytochromes containing phyC or phyE. Following a pulse of red light, phyA, phyB, phyC, and phyD interact in vivo with the PIF3 (PHYTOCHROME INTERACTING FACTOR3) basic helix-loop-helix transcription factor, and this interaction is FR reversible. Therefore, most or all of the type I and type II phytochromes, including heterodimeric forms, appear to function through PIF-mediated pathways (Clack et al., Plant Cell. 2009 March; 21(3):786-99).

[0019] In Arabidopsis, members of the PIF family have been shown to control light-regulated gene expression directly and indirectly. PIF1, PIF3, PIF4 and PIF5 are degraded in response to light signals, and physical interaction of PIF3 with phytochromes is necessary for the light-induced phosphorylation and degradation of PIF3. (Castillon et al., Trands in Plant Science, Volume 12, Issue 11, November 2007, Pages 514-521)

### 3. UROD (Uroporphyrinogen III Decarboxylase) Polypeptide

[0020] Uroporphyrinogen III decarboxylase or UROD is an enzyme involved in the conversion of uroporphyrinogen-III into coporphyrinogen, a precursor in heme or chlorophyll biosynthesis. The enzymatic reaction is as follows:

uroporphyrinogen-III<=>4CO2+coproporphyrinogen III

[0021] Martins et al., 2001 (The Journal of Biological Chemistry Vol. 276, No. 47, Issue of November 23, pp. 44108-44116) describe the crystal structure and substrate binding modeling of the Uroporphyrinogen-III Decarboxylase from Nicotiana tabacum.

[0022] Mohanty et al., 2006 (Planta 224: 692-699) report that the uroporphyrinogen decarboxylase gene (UroD) and gene product abundance was stimulated by light and heat-stress. Also reported is increased enzymatic activity of UroD in heat-stressed cucumber seedlings.

[0023] Mock and Grimm 1997 (Plant Physiol. 113: 1101-1112) report introducing a full-length cDNA sequence encoding tobacco (Nicotiana tabacum) uroporphyrinogen III decarboxylase (UROD; EC 4.1.1.37) in reverse orientation under the control of a cauliflower mosaic virus 35s promoter derivative into the tobacco genome to study the effects of deregulated UROD expression on tetrapyrrole biosynthesis. The authors report the transformants to have reduced UROD activity and stunted plant growth and necrotic leaf lesions. They further report that antisense RNA expression caused reduced UROD protein levels and reduced activity to 45% of wild type, which was correlated with the accumulation of uroporphyrin(ogen) and with the intensity of necrotic damage. Also mentioned is that chlorophyll levels were only slightly reduced (up to 15%), indicating that the plants sustained cellular damage from accumulating photosensitive porphyrins rather than from chlorophyll deficiency.

### 4. AS-MTT (Abiotic Stress Membrane Tethered Transcription Factor) Polypeptides

[0024] Membrane-tethered transcription factors (MTTFs) differ from cytosolic transcription factors (TF) in that they are innately membrane-bound. To attain TF activity, MTTFs are released from the membrane anchor as a result of proteolytic cleavage. This enables MTTFs to travel to the nucleus and modulate gene expression. A genome-scale analysis showed that over 10% of all transcription factors are membrane bound, indicating that activation of MTFs occurs at the genomic level, allowing transcription to be regulated rapidly under stressful conditions. Seo et al. (2008). Trends Plant Sci. 13(10):550-556. Arabidopsis MTTFs characterized to date belong to either the bZIP or the NAC family. Chen et al. (2008). Curr Opin Plant Biol. 11(6):695-701. The current application characterizes a novel class of MTTFs, the AS-MTT (Abiotic Stress-MT), which comprise a DUF 1664 domain. DUF 1664 refers to a protein domain of previously unknown function which is highly conserved amongst plant MTTFs.

### 5. EXO-1 Polypeptide

[0025] RAD2 nucleases are involved in DNA repair processes. They exist in all eukaryotic organisms. There is at least 4-5 classes based on sequence and activity. XPG (Class I): incises the target strand 3′ to the bubble-like, damage-containing structure. FEN-1 (Class II) exhibits a flap endonuclease activity for bifurcated DNA structures. Exo-1 (Class III) operates as a 5′-nuclease (i.e. either a 5′-flap endonuclease or a 5′-3′ exonuclease). SEND/GEN (Class IV) is still yet unclear in the opinion of scientific community.

### 6. YiAP2 Polypeptides

[0026] The APETALA2-like genes form a large multi-gene family of transcription factors which play an important role during the plant life cycle, being key regulators of many developmental processes. Many studies in Arabidopsis have revealed that the APETALA2 (AP2) gene is implicated in the establishment of floral meristem and floral organ identity as well as temporal and spatial regulation of flower homeotic gene expression (Gil-Humanes et al. 2009 BMC Plant Biol. 29; 9(1):66). The APETALA2-like (AP2-like) gene family exhibits patterns of both gene and domain duplication, coupled with changes in sequence, exon arrangement, and expression. Genetic evolution studies analyses of AP2-like genes from green plants support the presence of the two major lineages in the AP2-like genes, the euAP2 and the AINTEGUMENTA (ANT). Furthermore a duplication of the AP2 domain occurred prior to the separation of the two lineages. The ANT lineage is supported by a 10-aa insertion in the AP2-R1 domain and a 1-aa insertion in the AP2-R2 domain, relative to all other members of the AP2-like family. MicroRNA172-binding sequences, the function of which has been studied in some of the AP2-like genes in Arabidopsis, are restricted to the euAP2 lineage and therefore absent from AP2-like proteins of the ANT lineage (Kim et al; Mol Biol Evol. 2006 January; 23(1):107-20). Protein encoded by members of the euAP2 gene family, which posses only one AP2 domain, more specifically of the ERF type have been previously described as useful to use in methods to enhance yield-related traits in plants (WO 2007/144190). Surprisingly, it has now been found that modulating expression of a nucleic acid encoding an AP2-like polypeptide of the ANT linage, the YiAP2 polypeptide, gives plants having enhanced yield-related traits relative to control plants.

[0027] According one embodiment, there is provided a method for improving yield-related traits in plants relative to control plants, comprising modulating expression in a plant of a nucleic acid encoding a YiAP2 polypeptide.

### SUMMARY

[0028] 1. FSM1-like (Fruit Sant/Myb) Polypeptides

[0029] Surprisingly, it has now been found that modulating expression of a nucleic acid encoding a FSM1-like polypeptide gives plants having enhanced yield-related traits, in particular increased yield relative to control plants.

[0030] According one embodiment, there is provided a method for improving yield-related traits in plants relative to control plants, comprising modulating expression in a plant of a nucleic acid encoding a FSM1-like polypeptide.

2. PIF3-like (Phytochrome Interacting Factor 3) Polypeptides

[0031] Surprisingly, it has now been found that modulating expression of a nucleic acid encoding a PIF3-like polypeptide gives plants having enhanced yield-related traits, in particular increased seed yield and/or early vigour, relative to control plants.

[0032] According one embodiment, there is provided a method for improving yield-related traits in plants relative to control plants, comprising modulating expression in a plant of a nucleic acid encoding a PIF3-like polypeptide.

### 3. UROD (Uroporphyrinogen III Decarboxylase) Polypeptide

[0033] Surprisingly, it has now been found that modulating expression of a nucleic acid encoding a UROD polypeptide gives plants having enhanced yield-related traits, in particular increased yield relative to control plants.

[0034] According one embodiment, there is provided a method for improving yield-related traits in plants relative to control plants, comprising modulating expression in a plant of a nucleic acid encoding a UROD polypeptide.

### 4. AS-MTT (Abiotic Stress Membrane Tethered Transcription Factor) Polypeptides

[0035] Surprisingly, it has now been found that modulating expression of a nucleic acid encoding an AS-MTT polypeptide gives plants having enhanced yield-related traits, relative to control plants.

[0036] According one embodiment, there is provided a method for enhancing yield related traits of a plant relative to control plants, comprising modulating expression of a nucleic acid encoding an AS-MTT polypeptide in a plant.

### 5. EXO-1 Polypeptide

[0037] Surprisingly, it has now been found that modulating expression of a nucleic acid encoding an EXO-1 polypeptide gives plants having enhanced yield-related traits, in particular increased yield relative to control plants.

[0038] According one embodiment, there is provided a method for improving yield-related traits in plants relative to control plants, comprising modulating expression in a plant of a nucleic acid encoding an EXO-1 polypeptide.

### DEFINITIONS

[0039] The following definitions will be used throughout the present specification.

### Polypeptide(s)/Protein(s)

[0040] The terms “polypeptide” and “protein” are used interchangeably herein and refer to amino acids in a polymeric form of any length, linked together by peptide bonds.

### Polynucleotide(s)/Nucleic Acid(s)/Nucleic Acid Sequence(s)/Nucleotide Sequence(s)

[0041] The terms “polynucleotide(s)”, “nucleic acid sequence(s)”, “nucleotide sequence(s)”, “nucleic acid(s)”, “nucleic acid molecule” are used interchangeably herein and refer to nucleotides, either ribonucleotides or deoxyribonucleotides or a combination of both, in a polymeric unbranched form of any length.

### Homologue(s)

[0042] “Homologues” of a protein encompass peptides, oligopeptides, polypeptides, proteins and enzymes having amino acid substitutions, deletions and/or insertions relative to the unmodified protein in question and having similar biological and functional activity as the unmodified protein from which they are derived.

[0043] A deletion refers to removal of one or more amino acids from a protein.

[0044] An insertion refers to one or more amino acid residues being introduced into a predetermined site in a protein. Insertions may comprise N-terminal and/or C-terminal fusions as well as intra-sequence insertions of single or multiple amino acids. Generally, insertions within the amino acid sequence will be smaller than N- or C-terminal fusions, of the order of about 1 to 10 residues. Examples of N- or C-terminal fusion proteins or peptides include the binding domain or activation domain of a transcriptional activator as used in the yeast two-hybrid system, phage coat proteins, (histidine)-6-tag, glutathione S-transferase-tag, protein A, maltose-binding protein, dihydrofolate reductase, Tag•100 epitope, c-myc epitope, FLAG®-epitope, lacZ, CMP (calmodulin-binding peptide), HA epitope, protein C epitope and VSV epitope.

[0045] A substitution refers to replacement of amino acids of the protein with other amino acids having similar properties (such as similar hydrophobicity, hydrophilicity, antigenicity, propensity to form or break α-helical structures or β-sheet structures). Amino acid substitutions are typically of single residues, but may be clustered depending upon functional constraints placed upon the polypeptide and may range from 1 to 10 amino acids; insertions will usually be of the order of about 1 to 10 amino acid residues. The amino acid substitutions are preferably conservative amino acid substitutions. Conservative substitution tables are well known in the art (see for example Creighton (1984) Proteins. W.H. Freeman and Company (Eds) and Table 1 below).

TABLE 1
Examples of conserved amino acid substitutions

| Residue | Conservative Substitutions | Residue | Conservative Substitutions |
|---|---|---|---|
| Ala | Ser | Leu | Ile; Val |
| Arg | Lys | Lys | Arg; Gln |
| Asn | Gln; His | Met | Leu; Ile |
| Asp | Glu | Phe | Met; Leu; Tyr |
| Gln | Asn | Ser | Thr; Gly |
| Cys | Ser | Thr | Ser; Val |
| Glu | Asp | Trp | Tyr |
| Gly | Pro | Tyr | Trp; Phe |
| His | Asn; Gln | Val | Ile; Leu |
| Ile | Leu, Val | | |

[0046] Amino acid substitutions, deletions and/or insertions may readily be made using peptide synthetic techniques well known in the art, such as solid phase peptide synthesis and the like, or by recombinant DNA manipulation. Methods for the manipulation of DNA sequences to produce substitution, insertion or deletion variants of a protein are well known in the art. For example, techniques for making substitution mutations at predetermined sites in DNA are well known to those skilled in the art and include M13 mutagenesis, T7-Gen in vitro mutagenesis (USB, Cleveland, Ohio), QuickChange Site Directed mutagenesis (Stratagene, San Diego, Calif.), PCR-mediated site-directed mutagenesis or other site-directed mutagenesis protocols.

### Derivatives

[0047] “Derivatives” include peptides, oligopeptides, polypeptides which may, compared to the amino acid sequence of the naturally-occurring form of the protein, such as the protein of interest, comprise substitutions of amino acids with non-naturally occurring amino acid residues, or additions of non-naturally occurring amino acid residues. “Derivatives” of a protein also encompass peptides, oligopeptides, polypeptides which comprise naturally occurring altered (glycosylated, acylated, prenylated, phosphorylated, myristoylated, sulphated etc.) or non-naturally altered amino acid residues compared to the amino acid sequence of a naturally-occurring form of the polypeptide. A derivative may also comprise one or more non-amino acid substituents or additions compared to the amino acid sequence from which it is derived, for example a reporter molecule or other ligand, covalently or non-covalently bound to the amino acid sequence, such as a reporter molecule which is bound to facilitate its detection, and non-naturally occurring amino acid residues relative to the amino acid sequence of a naturally-occurring protein. Furthermore, “derivatives” also include fusions of the naturally-occurring form of the protein with tagging peptides such as FLAG, HIS6 or thioredoxin (for a review of tagging peptides, see Terpe, Appl. Microbiol. Biotechnol. 60, 523-533, 2003).

### Orthologue(s)/Paralogue(s)

[0048] Orthologues and paralogues encompass evolutionary concepts used to describe the ancestral relationships of genes. Paralogues are genes within the same species that have originated through duplication of an ancestral gene; orthologues are genes from different organisms that have originated through speciation, and are also derived from a common ancestral gene.

### Domain, Motif/Consensus Sequence/Signature

[0049] The term “domain” refers to a set of amino acids conserved at specific positions along an alignment of sequences of evolutionarily related proteins. While amino acids at other positions can vary between homologues, amino acids that are highly conserved at specific positions indicate amino acids that are likely essential in the structure, stability or function of a protein. Identified by their high degree of conservation in aligned sequences of a family of protein homologues, they can be used as identifiers to determine if any polypeptide in question belongs to a previously identified polypeptide family.

[0050] The term “motif” or “consensus sequence” or “signature” refers to a short conserved region in the sequence of evolutionarily related proteins. Motifs are frequently highly conserved parts of domains, but may also include only part of the domain, or be located outside of conserved domain (if all of the amino acids of the motif fall outside of a defined domain).

[0051] Specialist databases exist for the identification of domains, for example, SMART (Schultz et al. (1998) Proc. Natl. Acad. Sci. USA 95, 5857-5864; Letunic et al. (2002) Nucleic Acids Res 30, 242-244), InterPro (Mulder et al., (2003) Nucl. Acids. Res. 31, 315-318), Prosite (Bucher and Bairoch (1994), A generalized profile syntax for biomolecular sequences motifs and its function in automatic sequence interpretation. (In) ISMB-94; Proceedings 2nd International Conference on Intelligent Systems for Molecular Biology. Altman R., Brutlag D., Karp P., Lathrop R., Searls D., Eds., pp 53-61, AAAI Press, Menlo Park; Hulo et al., Nucl. Acids. Res. 32:D134-D137, (2004)), or Pfam (Bateman et al., Nucleic Acids Research 30(1): 276-280 (2002)). A set of tools for in silico analysis of protein sequences is available on the ExPASy proteomics server (Swiss Institute of Bioinformatics (Gasteiger et al., ExPASy: the proteomics server for in-depth protein knowledge and analysis, Nucleic Acids Res. 31:3784-3788 (2003)). Domains or motifs may also be identified using routine techniques, such as by sequence alignment.

[0052] Methods for the alignment of sequences for comparison are well known in the art, such methods include GAP, BESTFIT, BLAST, FASTA and TFASTA. GAP uses the algorithm of Needleman and Wunsch ((1970) J Mol Biol 48: 443-453) to find the global (i.e. spanning the complete sequences) alignment of two sequences that maximizes the number of matches and minimizes the number of gaps. The BLAST algorithm (Altschul et al. (1990) J Mol Biol 215: 403-10) calculates percent sequence identity and performs a statistical analysis of the similarity between the two sequences. The software for performing BLAST analysis is publicly available through the National Centre for Biotechnology Information (NCBI). Homologues may readily be identified using, for example, the ClustalW multiple sequence alignment algorithm (version 1.83), with the default pairwise alignment parameters, and a scoring method in percentage. Global percentages of similarity and identity may also be determined using one of the methods available in the MatGAT software package (Campanella et al., BMC Bioinformatics. 2003 Jul. 10; 4:29. MatGAT: an application that generates similarity/identity matrices using protein or DNA sequences.). Minor manual editing may be performed to optimise alignment between conserved motifs, as would be apparent to a person skilled in the art. Furthermore, instead of using full-length sequences for the identification of homologues, specific domains may also be used. The sequence identity values may be determined over the entire nucleic acid or amino acid sequence or over selected domains or conserved motif(s), using the programs mentioned above using the default parameters. For local alignments, the Smith-Waterman algorithm is particularly useful (Smith T F, Waterman M S (1981) J. Mol. Biol. 147(1);195-7).

### Reciprocal BLAST

[0053] Typically, this involves a first BLAST involving BLASTing a query sequence (for example using any of the sequences listed in Table A of the Examples section) against any sequence database, such as the publicly available NCBI database. BLASTN or TBLASTX (using standard default values) are generally used when starting from a nucleotide sequence, and BLASTP or TBLASTN (using standard default values) when starting from a protein sequence. The BLAST results may optionally be filtered. The full-length sequences of either the filtered results or non-filtered results are then BLASTed back (second BLAST) against sequences from the organism from which the query sequence is derived. The results of the first and second BLASTs are then compared. A paralogue is identified if a high-ranking hit from the first blast is from the same species as from which the query sequence is derived, a BLAST back then ideally results in the query sequence amongst the highest hits; an orthologue is identified if a high-ranking hit in the first BLAST is not from the same species as from which the query sequence is derived, and preferably results upon BLAST back in the query sequence being among the highest hits.

[0054] High-ranking hits are those having a low E-value. The lower the E-value, the more significant the score (or in other words the lower the chance that the hit was found by chance). Computation of the E-value is well known in the art. In addition to E-values, comparisons are also scored by percentage identity. Percentage identity refers to the number of identical nucleotides (or amino acids) between the two compared nucleic acid (or polypeptide) sequences over a particular length. In the case of large families, ClustalW may be used, followed by a neighbour joining tree, to help visualize clustering of related genes and to identify orthologues and paralogues.

### Hybridisation

[0055] The term “hybridisation” as defined herein is a process wherein substantially homologous complementary nucleotide sequences anneal to each other. The hybridisation process can occur entirely in solution, i.e. both complementary nucleic acids are in solution. The hybridisation process can also occur with one of the complementary nucleic acids immobilised to a matrix such as magnetic beads, Sepharose beads or any other resin. The hybridisation process can furthermore occur with one of the complementary nucleic acids immobilised to a solid support such as a nitro-cellulose or nylon membrane or immobilised by e.g. photolithography to, for example, a siliceous glass support (the latter known as nucleic acid arrays or microarrays or as nucleic acid chips). In order to allow hybridisation to occur, the nucleic acid molecules are generally thermally or chemically denatured to melt a double strand into two single strands and/or to remove hairpins or other secondary structures from single stranded nucleic acids.

[0056] The term “stringency” refers to the conditions under which a hybridisation takes place. The stringency of hybridisation is influenced by conditions such as temperature, salt concentration, ionic strength and hybridisation buffer composition. Generally, low stringency conditions are selected to be about 30° C. lower than the thermal melting point (Tₘ) for the specific sequence at a defined ionic strength and pH. Medium stringency conditions are when the temperature is 20° C. below Tₘ, and high stringency conditions are when the temperature is 10° C. below Tₘ. High stringency hybridisation conditions are typically used for isolating hybridising sequences that have high sequence similarity to the target nucleic acid sequence. However, nucleic acids may deviate in sequence and still encode a substantially identical polypeptide, due to the degeneracy of the genetic code. Therefore medium stringency hybridisation conditions may sometimes be needed to identify such nucleic acid molecules.

[0057] The Tₘ is the temperature under defined ionic strength and pH, at which 50% of the target sequence hybridises to a perfectly matched probe. The Tₘ is dependent upon the solution conditions and the base composition and length of the probe. For example, longer sequences hybridise specifically at higher temperatures. The maximum rate of hybridisation is obtained from about 16° C. up to 32° C. below Tₘ. The presence of monovalent cations in the hybridisation solution reduce the electrostatic repulsion between the two nucleic acid strands thereby promoting hybrid formation; this effect is visible for sodium concentrations of up to 0.4M (for higher concentrations, this effect may be ignored). Formamide reduces the melting temperature of DNA-DNA and DNA-RNA duplexes with 0.6 to 0.7° C. for each percent formamide, and addition of 50% formamide allows hybridisation to be performed at 30 to 45° C., though the rate of hybridisation will be lowered. Base pair mismatches reduce the hybridisation rate and the thermal stability of the duplexes. On average and for large probes, the Tm decreases about 1° C. per % base mismatch. The Tₘ may be calculated using the following equations, depending on the types of hybrids:

1) DNA-DNA hybrids (Meinkoth and Wahl, Anal. Biochem., 138: 267-284, 1984):
[0058] Tₘ=81.5° C.+16.6×log₁₀[Na⁺]^{a}+0.41×%[G/C^{b}]−500×[L^{c}]⁻¹−0.61×% formamide
   2) DNA-RNA or RNA-RNA hybrids:
[0059] Tₘ=79.8° C.+18.5(log₁₀[Na⁺]^{a})+0.58 (%G/C^{b})+11.8 (%G/C^{b})²−820/L^{c}
   3) oligo-DNA or oligo-RNAs hybrids:
[0060] For <20 nucleotides: Tₘ=2 (lₙ)
[0061] For 20-35 nucleotides: Tₘ=22+1.46 (lₙ)
   ^{a} or for other monovalent cation, but only accurate in the 0.01-0.4 M range.
   ^{b} only accurate for %GC in the 30% to 75% range.
   ^{c} L=length of duplex in base pairs.
   ^{d} oligo, oligonucleotide; lₙ=effective length of primer=2×(no. of G/C)+(no. of A/T).

[0062] Non-specific binding may be controlled using any one of a number of known techniques such as, for example, blocking the membrane with protein containing solutions, additions of heterologous RNA, DNA, and SDS to the hybridisation buffer, and treatment with Rnase. For non-homologous probes, a series of hybridizations may be performed by varying one of (i) progressively lowering the annealing temperature (for example from 68° C. to 42° C.) or (ii) progressively lowering the formamide concentration (for example from 50% to 0%). The skilled artisan is aware of various parameters which may be altered during hybridisation and which will either maintain or change the stringency conditions.

[0063] Besides the hybridisation conditions, specificity of hybridisation typically also depends on the function of post-hybridisation washes. To remove background resulting from non-specific hybridisation, samples are washed with dilute salt solutions. Critical factors of such washes include the ionic strength and temperature of the final wash solution: the lower the salt concentration and the higher the wash temperature, the higher the stringency of the wash. Wash conditions are typically performed at or below hybridisation stringency. A positive hybridisation gives a signal that is at least twice of that of the background. Generally, suitable stringent conditions for nucleic acid hybridisation assays or gene amplification detection procedures are as set forth above. More or less stringent conditions may also be selected. The skilled artisan is aware of various parameters which may be altered during washing and which will either maintain or change the stringency conditions.

[0064] For example, typical high stringency hybridisation conditions for DNA hybrids longer than 50 nucleotides encompass hybridisation at 65° C. in 1×SSC or at 42° C. in 1×SSC and 50% formamide, followed by washing at 65° C. in 0.3×SSC. Examples of medium stringency hybridisation conditions for DNA hybrids longer than 50 nucleotides encompass hybridisation at 50° C. in 4×SSC or at 40° C. in 6×SSC and 50% formamide, followed by washing at 50° C. in 2×SSC. The length of the hybrid is the anticipated length for the hybridising nucleic acid. When nucleic acids of known sequence are hybridised, the hybrid length may be determined by aligning the sequences and identifying the conserved regions described herein. 1×SSC is 0.15M NaCl and 15 mM sodium citrate; the hybridisation solution and wash solutions may additionally include 5×Denhardt's reagent, 0.5-1.0% SDS, 100 μg/ml denatured, fragmented salmon sperm DNA, 0.5% sodium pyrophosphate.

[0065] For the purposes of defining the level of stringency, reference can be made to Sambrook et al. (2001) Molecular Cloning: a laboratory manual, 3rd Edition, Cold Spring Harbor Laboratory Press, CSH, New York or to Current Protocols in Molecular Biology, John Wiley & Sons, N.Y. (1989 and yearly updates).

### Splice Variant

[0066] The term “splice variant” as used herein encompasses variants of a nucleic acid sequence in which selected introns and/or exons have been excised, replaced, displaced or added, or in which introns have been shortened or lengthened. Such variants will be ones in which the biological activity of the protein is substantially retained; this may be achieved by selectively retaining functional segments of the protein. Such splice variants may be found in nature or may be manmade. Methods for predicting and isolating such splice variants are well known in the art (see for example Foissac and Schiex (2005) BMC Bioinformatics 6: 25).

### Allelic Variant

[0067] Alleles or allelic variants are alternative forms of a given gene, located at the same chromosomal position. Allelic variants encompass Single Nucleotide Polymorphisms (SNPs), as well as Small Insertion/Deletion Polymorphisms (INDELs). The size of INDELs is usually less than 100 bp. SNPs and INDELs form the largest set of sequence variants in naturally occurring polymorphic strains of most organisms.

### Endogenous Gene

[0068] Reference herein to an “endogenous” gene not only refers to the gene in question as found in a plant in its natural form (i.e., without there being any human intervention), but also refers to that same gene (or a substantially homologous nucleic acid/gene) in an isolated form subsequently (re)introduced into a plant (a transgene). For example, a transgenic plant containing such a transgene may encounter a substantial reduction of the transgene expression and/or substantial reduction of expression of the endogenous gene. The isolated gene may be isolated from an organism or may be manmade, for example by chemical synthesis.

### Gene Shuffling/Directed Evolution

[0069] Gene shuffling or directed evolution consists of iterations of DNA shuffling followed by appropriate screening and/or selection to generate variants of nucleic acids or portions thereof encoding proteins having a modified biological activity (Castle et al., (2004) Science 304(5674): 1151-4; U.S. Pat. Nos. 5,811,238 and 6,395,547).

### Construct

[0070] Additional regulatory elements may include transcriptional as well as translational enhancers. Those skilled in the art will be aware of terminator and enhancer sequences that may be suitable for use in performing the invention. An intron sequence may also be added to the 5′ untranslated region (UTR) or in the coding sequence to increase the amount of the mature message that accumulates in the cytosol, as described in the definitions section. Other control sequences (besides promoter, enhancer, silencer, intron sequences, 3′UTR and/or 5′UTR regions) may be protein and/or RNA stabilizing elements. Such sequences would be known or may readily be obtained by a person skilled in the art.

[0071] The genetic constructs of the invention may further include an origin of replication sequence that is required for maintenance and/or replication in a specific cell type. One example is when a genetic construct is required to be maintained in a bacterial cell as an episomal genetic element (e.g. plasmid or cosmid molecule). Preferred origins of replication include, but are not limited to, the f1-ori and colE1.

[0072] For the detection of the successful transfer of the nucleic acid sequences as used in the methods of the invention and/or selection of transgenic plants comprising these nucleic acids, it is advantageous to use marker genes (or reporter genes). Therefore, the genetic construct may optionally comprise a selectable marker gene. Selectable markers are described in more detail in the “definitions” section herein. The marker genes may be removed or excised from the transgenic cell once they are no longer needed. Techniques for marker removal are known in the art, useful techniques are described above in the definitions section.

### Regulatory Element/Control Sequence/Promoter

[0073] The terms “regulatory element”, “control sequence” and “promoter” are all used interchangeably herein and are to be taken in a broad context to refer to regulatory nucleic acid sequences capable of effecting expression of the sequences to which they are ligated. The term “promoter” typically refers to a nucleic acid control sequence located upstream from the transcriptional start of a gene and which is involved in recognising and binding of RNA polymerase and other proteins, thereby directing transcription of an operably linked nucleic acid. Encompassed by the aforementioned terms are transcriptional regulatory sequences derived from a classical eukaryotic genomic gene (including the TATA box which is required for accurate transcription initiation, with or without a CCAAT box sequence) and additional regulatory elements (i.e. upstream activating sequences, enhancers and silencers) which alter gene expression in response to developmental and/or external stimuli, or in a tissue-specific manner. Also included within the term is a transcriptional regulatory sequence of a classical prokaryotic gene, in which case it may include a −35 box sequence and/or −10 box transcriptional regulatory sequences. The term “regulatory element” also encompasses a synthetic fusion molecule or derivative that confers, activates or enhances expression of a nucleic acid molecule in a cell, tissue or organ.

[0074] A “plant promoter” comprises regulatory elements, which mediate the expression of a coding sequence segment in plant cells. Accordingly, a plant promoter need not be of plant origin, but may originate from viruses or micro-organisms, for example from viruses which attack plant cells. The “plant promoter” can also originate from a plant cell, e.g. from the plant which is transformed with the nucleic acid sequence to be expressed in the inventive process and described herein. This also applies to other “plant” regulatory signals, such as “plant” terminators. The promoters upstream of the nucleotide sequences useful in the methods of the present invention can be modified by one or more nucleotide substitution(s), insertion(s) and/or deletion(s) without interfering with the functionality or activity of either the promoters, the open reading frame (ORF) or the 3′-regulatory region such as terminators or other 3′ regulatory regions which are located away from the ORF. It is furthermore possible that the activity of the promoters is increased by modification of their sequence, or that they are replaced completely by more active promoters, even promoters from heterologous organisms. For expression in plants, the nucleic acid molecule must, as described above, be linked operably to or comprise a suitable promoter which expresses the gene at the right point in time and with the required spatial expression pattern.

[0075] For the identification of functionally equivalent promoters, the promoter strength and/or expression pattern of a candidate promoter may be analysed for example by operably linking the promoter to a reporter gene and assaying the expression level and pattern of the reporter gene in various tissues of the plant. Suitable well-known reporter genes include for example beta-glucuronidase or beta-galactosidase. The promoter activity is assayed by measuring the enzymatic activity of the beta-glucuronidase or beta-galactosidase. The promoter strength and/or expression pattern may then be compared to that of a reference promoter (such as the one used in the methods of the present invention). Alternatively, promoter strength may be assayed by quantifying mRNA levels or by comparing mRNA levels of the nucleic acid used in the methods of the present invention, with mRNA levels of housekeeping genes such as 18S rRNA, using methods known in the art, such as Northern blotting with densitometric analysis of autoradiograms, quantitative real-time PCR or RT-PCR (Heid et al., 1996 Genome Methods 6: 986-994). Generally by “weak promoter” is intended a promoter that drives expression of a coding sequence at a low level. By “low level” is intended at levels of about 1/10,000 transcripts to about 1/100,000 transcripts, to about 1/500,0000 transcripts per cell. Conversely, a “strong promoter” drives expression of a coding sequence at high level, or at about 1/10 transcripts to about 1/100 transcripts to about 1/1000 transcripts per cell. Generally, by “medium strength promoter” is intended a promoter that drives expression of a coding sequence at a lower level than a strong promoter, in particular at a level that is in all instances below that obtained when under the control of a 35S CaMV promoter.

### Operably Linked

[0076] The term “operably linked” as used herein refers to a functional linkage between the promoter sequence and the gene of interest, such that the promoter sequence is able to initiate transcription of the gene of interest.

### Constitutive Promoter

[0077] A “constitutive promoter” refers to a promoter that is transcriptionally active during most, but not necessarily all, phases of growth and development and under most environmental conditions, in at least one cell, tissue or organ. Table 2a below gives examples of constitutive promoters.

TABLE 2a
Examples of constitutive promoters

| Gene Source | Reference |
|---|---|
| Actin | McElroy et al, Plant Cell, 2: 163-171, 1990 |
| HMGP | WO 2004/070039 |
| CAMV 35S | Odell et al, Nature, 313: 810-812, 1985 |
| CaMV 19S | Nilsson et al., Physiol. Plant. 100: 456-462, 1997 |
| GOS2 | de Pater et al, Plant J Nov; 2(6): 837-44, 1992, |
| | WO 2004/065596 |
| Ubiquitin | Christensen et al, Plant Mol. Biol. 18: 675-689, |
| | 1992 |
| Rice cyclophilin | Buchholz et al, Plant Mol Biol. 25(5): 837-43, 1994 |
| Maize H3 histone | Lepetit et al, Mol. Gen. Genet. 231: 276-285, 1992 |
| Alfalfa H3 histone | Wu et al. Plant Mol. Biol. 11: 641-649, 1988 |
| Actin 2 | An et al, Plant J. 10(1); 107-121, 1996 |
| 34S FMV | Sanger et al., Plant. Mol. Biol., 14, 1990: 433-443 |
| Rubisco small subunit | U.S. Pat. No. 4,962,028 |
| OCS | Leisner (1988) Proc Natl Acad Sci USA 85(5): |
| | 2553 |
| SAD1 | Jain et al., Crop Science, 39 (6), 1999: 1696 |
| SAD2 | Jain et al., Crop Science, 39 (6), 1999: 1696 |
| nos | Shaw et al. (1984) Nucleic Acids Res. 12(20): |
| | 7831-7846 |
| V-ATPase | WO 01/14572 |
| Super promoter | WO 95/14098 |
| G-box proteins | WO 94/12015 |

### Ubiquitous Promoter

[0078] A ubiquitous promoter is active in substantially all tissues or cells of an organism.

### Developmentally-Regulated Promoter

[0079] A developmentally-regulated promoter is active during certain developmental stages or in parts of the plant that undergo developmental changes.

### Inducible Promoter

[0080] An inducible promoter has induced or increased transcription initiation in response to a chemical (for a review see Gatz 1997, Annu. Rev. Plant Physiol. Plant Mol. Biol., 48:89-108), environmental or physical stimulus, or may be “stress-inducible”, i.e. activated when a plant is exposed to various stress conditions, or a “pathogen-inducible” i.e. activated when a plant is exposed to exposure to various pathogens.

### Organ-Specific/Tissue-Specific Promoter

[0081] An organ-specific or tissue-specific promoter is one that is capable of preferentially initiating transcription in certain organs or tissues, such as the leaves, roots, seed tissue etc. For example, a “root-specific promoter” is a promoter that is transcriptionally active predominantly in plant roots, substantially to the exclusion of any other parts of a plant, whilst still allowing for any leaky expression in these other plant parts. Promoters able to initiate transcription in certain cells only are referred to herein as “cell-specific”.

[0082] Examples of root-specific promoters are listed in Table 2b below:

TABLE 2b
Examples of root-specific promoters

| Gene Source | Reference |
|---|---|
| RCc3 | Plant Mol Biol. 1995 January; 27(2): 237-48 |
| Arabidopsis PHT1 | Koyama et al. J Biosci Bioeng. 2005 January; 99(1): 38-42.; |
| | Mudge et al. (2002, Plant J. 31: 341) |
| Medicago phosphate transporter | Xiao et al., 2006, Plant Biol (Stuttg). 2006 July; 8(4): 439-49 |
| Arabidopsis Pyk10 | Nitz et al. (2001) Plant Sci 161(2): 337-346 |
| root-expressible genes | Tingey et al., EMBO J. 6: 1, 1987. |
| tobacco auxin-inducible gene | Van der Zaal et al., Plant Mol. Biol. 16, 983, 1991. |
| β-tubulin | Oppenheimer, et al., Gene 63: 87, 1988. |
| tobacco root-specific genes | Conkling, et al., Plant Physiol. 93: 1203, 1990. |
| B. napus G1-3b gene | U.S. Pat. No. 5,401,836 |
| SbPRP1 | Suzuki et al., Plant Mol. Biol. 21: 109-119, 1993. |
| LRX1 | Baumberger et al. 2001, Genes & Dev. 15: 1128 |
| BTG-26 Brassica napus | US 20050044585 |
| LeAMT1 (tomato) | Lauter et al. (1996, PNAS 3: 8139) |
| The LeNRT1-1 (tomato) | Lauter et al. (1996, PNAS 3: 8139) |
| class I patatin gene (potato) | Liu et al., Plant Mol. Biol. 17 (6): 1139-1154 |
| KDC1 (Daucus carota) | Downey et al. (2000, J. Biol. Chem. 275: 39420) |
| TobRB7 gene | W Song (1997) PhD Thesis, North Carolina State |
| | University, Raleigh, NC USA |
| OsRAB5a (rice) | Wang et al. 2002, Plant Sci. 163: 273 |
| ALF5 (Arabidopsis) | Diener et al. (2001, Plant Cell 13: 1625) |
| NRT2; 1Np (N. plumbaginifolia) | Quesada et al. (1997, Plant Mol. Biol. 34: 265) |

[0083] A seed-specific promoter is transcriptionally active predominantly in seed tissue, but not necessarily exclusively in seed tissue (in cases of leaky expression). The seed-specific promoter may be active during seed development and/or during germination. The seed specific promoter may be endosperm/aleurone/embryo specific. Examples of seed-specific promoters (endosperm/aleurone/embryo specific) are shown in Table 2c to Table 2f below. Further examples of seed-specific promoters are given in Qing Qu and Takaiwa (Plant Biotechnol. J. 2, 113-125, 2004), which disclosure is incorporated by reference herein as if fully set forth.

TABLE 2c
Examples of seed-specific promoters

| Gene source | Reference |
|---|---|
| seed-specific genes | Simon et al., Plant Mol. Biol. 5: 191, 1985; |
| | Scofield et al., J. Biol. Chem. 262: 12202, 1987.; |
| | Baszczynski et al., Plant Mol. Biol. 14: 633, 1990. |
| Brazil Nut albumin | Pearson et al., Plant Mol. Biol. 18: 235-245, 1992. |
| legumin | Ellis et al., Plant Mol. Biol. 10: 203-214, 1988. |
| glutelin (rice) | Takaiwa et al., Mol. Gen. Genet. 208: 15-22, 1986; |
| | Takaiwa et al., FEBS Letts. 221: 43-47, 1987. |
| zein | Matzke et al Plant Mol Biol, 14(3): 323-32 1990 |
| napA | Stalberg et al, Planta 199: 515-519, 1996. |
| wheat LMW and HMW glutenin-1 | Mol Gen Genet 216: 81-90, 1989; NAR 17: 461-2, 1989 |
| wheat SPA | Albani et al, Plant Cell, 9: 171-184, 1997 |
| wheat α, β, γ-gliadins | EMBO J. 3: 1409-15, 1984 |
| barley ltr1 promoter | Diaz et al. (1995) Mol Gen Genet 248(5): 592-8 |
| barley B1, C, D, hordein | Theor Appl Gen 98: 1253-62, 1999; Plant J 4: 343-55, |
| | 1993; Mol Gen Genet 250: 750-60, 1996 |
| barley DOF | Mena et al, The Plant Journal, 116(1): 53-62, 1998 |
| blz2 | EP99106056.7 |
| synthetic promoter | Vicente-Carbajosa et al., Plant J. 13: 629-640, 1998. |
| rice prolamin NRP33 | Wu et al, Plant Cell Physiology 39(8) 885-889, 1998 |
| rice a-globulin Glb-1 | Wu et al, Plant Cell Physiology 39(8) 885-889, 1998 |
| rice OSH1 | Sato et al, Proc. Natl. Acad. Sci. USA, 93: 8117-8122, |
| | 1996 |
| rice α-globulin REB/OHP-1 | Nakase et al. Plant Mol. Biol. 33: 513-522, 1997 |
| rice ADP-glucose pyrophos- | Trans Res 6: 157-68, 1997 |
| phorylase | |
| maize ESR gene family | Plant J 12: 235-46, 1997 |
| sorghum α-kafirin | DeRose et al., Plant Mol. Biol 32: 1029-35, 1996 |
| KNOX | Postma-Haarsma et al, Plant Mol. Biol. 39: 257-71, 1999 |
| rice oleosin | Wu et al, J. Biochem. 123: 386, 1998 |
| sunflower oleosin | Cummins et al., Plant Mol. Biol. 19: 873-876, 1992 |
| PRO0117, putative rice 40S | WO 2004/070039 |
| ribosomal protein | |
| PRO0136, rice alanine | unpublished |
| aminotransferase | |
| PRO0147, trypsin inhibitor ITR1 | unpublished |
| (barley) | |
| PRO0151, rice WSI18 | WO 2004/070039 |
| PRO0175, rice RAB21 | WO 2004/070039 |
| PRO005 | WO 2004/070039 |
| PRO0095 | WO 2004/070039 |
| α-amylase (Amy32b) | Lanahan et al, Plant Cell 4: 203-211, 1992; Skriver et al, |
| | Proc Natl Acad Sci USA 88: 7266-7270, 1991 |
| cathepsin β-like gene | Cejudo et al, Plant Mol Biol 20: 849-856, 1992 |
| Barley Ltp2 | Kalla et al., Plant J. 6: 849-60, 1994 |
| Chi26 | Leah et al., Plant J. 4: 579-89, 1994 |
| Maize B-Peru | Selinger et al., Genetics 149; 1125-38, 1998 |

TABLE 2d
examples of endosperm-specific promoters

| Gene source | Reference |
|---|---|
| glutelin (rice) | Takaiwa et al. (1986) Mol Gen Genet 208: 15-22; |
| | Takaiwa et al. (1987) FEBS Letts. 221: 43-47 |
| zein | Matzke et al., (1990) Plant Mol Biol 14(3): 323-32 |
| wheat LMW and HMW glutenin-1 | Colot et al. (1989) Mol Gen Genet 216: 81-90, |
| | Anderson et al. (1989) NAR 17: 461-2 |
| wheat SPA | Albani et al. (1997) Plant Cell 9: 171-184 |
| wheat gliadins | Rafalski et al. (1984) EMBO 3: 1409-15 |
| barley Itr1 promoter | Diaz et al. (1995) Mol Gen Genet 248(5): 592-8 |
| barley B1, C, D, hordein | Cho et al. (1999) Theor Appl Genet 98: 1253-62; |
| | Muller et al. (1993) Plant J 4: 343-55; |
| | Sorenson et al. (1996) Mol Gen Genet 250: 750-60 |
| barley DOF | Mena et al, (1998) Plant J 116(1): 53-62 |
| blz2 | Onate et al. (1999) J Biol Chem 274(14): 9175-82 |
| synthetic promoter | Vicente-Carbajosa et al. (1998) Plant J 13: 629-640 |
| rice prolamin NRP33 | Wu et al, (1998) Plant Cell Physiol 39(8) 885-889 |
| rice globulin Glb-1 | Wu et al. (1998) Plant Cell Physiol 39(8) 885-889 |
| rice globulin REB/OHP-1 | Nakase et al. (1997) Plant Molec Biol 33: 513-522 |
| rice ADP-glucose pyrophosphorylase | Russell et al. (1997) Trans Res 6: 157-68 |
| maize ESR gene family | Opsahl-Ferstad et al. (1997) Plant J 12: 235-46 |
| sorghum kafirin | DeRose et al. (1996) Plant Mol Biol 32: 1029-35 |

TABLE 2e
Examples of embryo specific promoters:

| Gene | |
|---|---|
| source | Reference |
| rice OSH1 | Sato et al, Proc. Natl. Acad. Sci. USA, 93: 8117-8122, 1996 |
| KNOX | Postma-Haarsma et al, Plant Mol. Biol. 39:257-71, 1999 |
| PRO0151 | WO 2004/070039 |
| PRO0175 | WO 2004/070039 |
| PRO005 | WO 2004/070039 |
| PRO0095 | WO 2004/070039 |

TABLE 2f
Examples of aleurone-specific promoters:

| Gene source | Reference |
|---|---|
| α-amylase (Amy32b) | Lanahan et al, Plant Cell 4:203-211, 1992; |
| | Skriver et al, Proc Natl Acad Sci USA |
| | 88:7266-7270, 1991 |
| cathepsin β-like gene | Cejudo et al, Plant Mol Biol 20:849-856, 1992 |
| Barley Ltp2 | Kalla et al., Plant J. 6:849-60, 1994 |
| Chi26 | Leah et al., Plant J. 4:579-89, 1994 |
| Maize B-Peru | Selinger et al., Genetics 149;1125-38, 1998 |

[0084] A green tissue-specific promoter as defined herein is a promoter that is transcriptionally active predominantly in green tissue, substantially to the exclusion of any other parts of a plant, whilst still allowing for any leaky expression in these other plant parts.

[0085] Examples of green tissue-specific promoters which may be used to perform the methods of the invention are shown in Table 2g below.

TABLE 2g
Examples of green tissue-specific promoters

| Gene | Expression | Reference |
|---|---|---|
| Maize Orthophosphate | Leaf specific | Fukavama et al., Plant Physiol. |
| dikinase | | November 2001;127(3):1136-46 |
| Maize | Leaf specific | Kausch et al., Plant Mol Biol. |
| Phosphoenolpyruvate | | January 2001;45(1):1-15 |
| carboxylase | | |
| Rice | Leaf specific | Lin et al., 2004 DNA Seq. |
| Phosphoenolpyruvate | | August 2004;15(4):269-76 |
| carboxylase | | |
| Rice small | Leaf specific | Nomura et al., Plant Mol Biol. |
| subunit Rubisco | | September 2000;44(1):99-106 |
| rice beta | Shoot | WO 2004/070039 |
| expansin EXBP9 | specific | |
| Pigeonpea small | Leaf specific | Panguluri et al., Indian J Exp Biol. |
| subunit Rubisco | | April 2005;43(4):369-72 |
| Pea RBCS3A | Leaf specific | |

[0086] Another example of a tissue-specific promoter is a meristem-specific promoter, which is transcriptionally active predominantly in meristematic tissue, substantially to the exclusion of any other parts of a plant, whilst still allowing for any leaky expression in these other plant parts. Examples of green meristem-specific promoters which may be used to perform the methods of the invention are shown in Table 2h below.

TABLE 2h
Examples of meristem-specific promoters

| Gene source | Expression pattern | Reference |
|---|---|---|
| rice OSH1 | Shoot apical meristem, | Sato et al. (1996) Proc. |
| | from embryo globular stage | Natl. Acad. Sci. USA, |
| | to seedling stage | 93: 8117-8122 |
| Rice | Meristem specific | BAD87835.1 |
| metallothionein | | |
| WAK1 & | Shoot and root apical | Wagner & Kohorn |
| WAK 2 | meristems, and in | (2001) Plant Cell |
| | expanding leaves and | 13(2): 303-318 |
| | sepals | |

### Terminator

[0087] The term “terminator” encompasses a control sequence which is a DNA sequence at the end of a transcriptional unit which signals 3′ processing and polyadenylation of a primary transcript and termination of transcription. The terminator can be derived from the natural gene, from a variety of other plant genes, or from T-DNA. The terminator to be added may be derived from, for example, the nopaline synthase or octopine synthase genes, or alternatively from another plant gene, or less preferably from any other eukaryotic gene.

### Selectable Marker (Gene)/Reporter Gene

[0088] “Selectable marker”, “selectable marker gene” or “reporter gene” includes any gene that confers a phenotype on a cell in which it is expressed to facilitate the identification and/or selection of cells that are transfected or transformed with a nucleic acid construct of the invention. These marker genes enable the identification of a successful transfer of the nucleic acid molecules via a series of different principles. Suitable markers may be selected from markers that confer antibiotic or herbicide resistance, that introduce a new metabolic trait or that allow visual selection. Examples of selectable marker genes include genes conferring resistance to antibiotics (such as nptII that phosphorylates neomycin and kanamycin, or hpt, phosphorylating hygromycin, or genes conferring resistance to, for example, bleomycin, streptomycin, tetracyclin, chloramphenicol, ampicillin, gentamycin, geneticin (G418), spectinomycin or blasticidin), to herbicides (for example bar which provides resistance to Basta®; aroA or gox providing resistance against glyphosate, or the genes conferring resistance to, for example, imidazolinone, phosphinothricin or sulfonylurea), or genes that provide a metabolic trait (such as manA that allows plants to use mannose as sole carbon source or xylose isomerase for the utilisation of xylose, or antinutritive markers such as the resistance to 2-deoxyglucose). Expression of visual marker genes results in the formation of colour (for example β-glucuronidase, GUS or β-galactosidase with its coloured substrates, for example X-Gal), luminescence (such as the luciferin/luceferase system) or fluorescence (Green Fluorescent Protein, GFP, and derivatives thereof). This list represents only a small number of possible markers. The skilled worker is familiar with such markers. Different markers are preferred, depending on the organism and the selection method.

[0089] It is known that upon stable or transient integration of nucleic acids into plant cells, only a minority of the cells takes up the foreign DNA and, if desired, integrates it into its genome, depending on the expression vector used and the transfection technique used. To identify and select these integrants, a gene coding for a selectable marker (such as the ones described above) is usually introduced into the host cells together with the gene of interest. These markers can for example be used in mutants in which these genes are not functional by, for example, deletion by conventional methods. Furthermore, nucleic acid molecules encoding a selectable marker can be introduced into a host cell on the same vector that comprises the sequence encoding the polypeptides of the invention or used in the methods of the invention, or else in a separate vector. Cells which have been stably transfected with the introduced nucleic acid can be identified for example by selection (for example, cells which have integrated the selectable marker survive whereas the other cells die).

[0090] Since the marker genes, particularly genes for resistance to antibiotics and herbicides, are no longer required or are undesired in the transgenic host cell once the nucleic acids have been introduced successfully, the process according to the invention for introducing the nucleic acids advantageously employs techniques which enable the removal or excision of these marker genes. One such a method is what is known as co-transformation. The co-transformation method employs two vectors simultaneously for the transformation, one vector bearing the nucleic acid according to the invention and a second bearing the marker gene(s). A large proportion of transformants receives or, in the case of plants, comprises (up to 40% or more of the transformants), both vectors. In case of transformation with Agrobacteria, the transformants usually receive only a part of the vector, i.e. the sequence flanked by the T-DNA, which usually represents the expression cassette. The marker genes can subsequently be removed from the transformed plant by performing crosses. In another method, marker genes integrated into a transposon are used for the transformation together with desired nucleic acid (known as the Ac/Ds technology). The transformants can be crossed with a transposase source or the transformants are transformed with a nucleic acid construct conferring expression of a transposase, transiently or stable. In some cases (approx. 10%), the transposon jumps out of the genome of the host cell once transformation has taken place successfully and is lost. In a further number of cases, the transposon jumps to a different location. In these cases the marker gene must be eliminated by performing crosses. In microbiology, techniques were developed which make possible, or facilitate, the detection of such events. A further advantageous method relies on what is known as recombination systems; whose advantage is that elimination by crossing can be dispensed with. The best-known system of this type is what is known as the Cre/lox system. Cre1 is a recombinase that removes the sequences located between the loxP sequences. If the marker gene is integrated between the loxP sequences, it is removed once transformation has taken place successfully, by expression of the recombinase. Further recombination systems are the HIN/HIX, FLP/FRT and REP/STB system (Tribble et al., J. Biol. Chem., 275, 2000: 22255-22267; Velmurugan et al., J. Cell Biol., 149, 2000: 553-566). A site-specific integration into the plant genome of the nucleic acid sequences according to the invention is possible. Naturally, these methods can also be applied to microorganisms such as yeast, fungi or bacteria.

### Transgenic/Transgene/Recombinant

[0091] For the purposes of the invention, “transgenic”, “transgene” or “recombinant” means with regard to, for example, a nucleic acid sequence, an expression cassette, gene construct or a vector comprising the nucleic acid sequence or an organism transformed with the nucleic acid sequences, expression cassettes or vectors according to the invention, all those constructions brought about by recombinant methods in which either
[0092] (a) the nucleic acid sequences encoding proteins useful in the methods of the invention, or
[0093] (b) genetic control sequence(s) which is operably linked with the nucleic acid sequence according to the invention, for example a promoter, or
[0094] (c) a) and b)
   are not located in their natural genetic environment or have been modified by recombinant methods, it being possible for the modification to take the form of, for example, a substitution, addition, deletion, inversion or insertion of one or more nucleotide residues. The natural genetic environment is understood as meaning the natural genomic or chromosomal locus in the original plant or the presence in a genomic library. In the case of a genomic library, the natural genetic environment of the nucleic acid sequence is preferably retained, at least in part. The environment flanks the nucleic acid sequence at least on one side and has a sequence length of at least 50 bp, preferably at least 500 bp, especially preferably at least 1000 bp, most preferably at least 5000 bp. A naturally occurring expression cassette—for example the naturally occurring combination of the natural promoter of the nucleic acid sequences with the corresponding nucleic acid sequence encoding a polypeptide useful in the methods of the present invention, as defined above—becomes a transgenic expression cassette when this expression cassette is modified by non-natural, synthetic (“artificial”) methods such as, for example, mutagenic treatment. Suitable methods are described, for example, in U.S. Pat. No. 5,565,350 or WO 00/15815.

[0095] A transgenic plant for the purposes of the invention is thus understood as meaning, as above, that the nucleic acids used in the method of the invention are not present in, or originating from, the genome of said plant, or are present in the genome of said plant but not at their natural locus in the genome of said plant, it being possible for the nucleic acids to be expressed homologously or heterologously. However, as mentioned, transgenic also means that, while the nucleic acids according to the invention or used in the inventive method are at their natural position in the genome of a plant, the sequence has been modified with regard to the natural sequence, and/or that the regulatory sequences of the natural sequences have been modified. Transgenic is preferably understood as meaning the expression of the nucleic acids according to the invention at an unnatural locus in the genome, i.e. homologous or, preferably, heterologous expression of the nucleic acids takes place. Preferred transgenic plants are mentioned herein.

[0096] It shall further be noted that in the context of the present invention, the term “isolated nucleic acid” or “isolated polypeptide” may in some instances be considered as a synonym for a “recombinant nucleic acid” or a “recombinant polypeptide”, respectively and refers to a nucleic acid or polypeptide that is not located in its natural genetic environment and/or that has been modified by recombinant methods.

### Modulation

[0097] The term “modulation” means in relation to expression or gene expression, a process in which the expression level is changed by said gene expression in comparison to the control plant, the expression level may be increased or decreased. The original, unmodulated expression may be of any kind of expression of a structural RNA (rRNA, tRNA) or mRNA with subsequent translation. For the purposes of this invention, the original unmodulated expression may also be absence of any expression. The term “modulating the activity” shall mean any change of the expression of the inventive nucleic acid sequences or encoded proteins, which leads to increased yield and/or increased growth of the plants. The expression can increase from zero (absence of or immeasurable expression) to a certain amount, or can decrease from a certain amount to immeasurable small amounts or zero.

### Expression

[0098] The term “expression” or “gene expression” means the transcription of a specific gene or specific genes or specific genetic construct. The term “expression” or “gene expression” in particular means the transcription of a gene or genes or genetic construct into structural RNA (rRNA, tRNA) or mRNA with or without subsequent translation of the latter into a protein. The process includes transcription of DNA and processing of the resulting mRNA product.

### Increased Expression/Overexpression

[0099] The term “increased expression” or “overexpression” as used herein means any form of expression that is additional to the original wild-type expression level. For the purposes of this invention, the original wild-type expression level might also be zero ((absence of or immeasurable expression)).

[0100] Methods for increasing expression of genes or gene products are well documented in the art and include, for example, overexpression driven by appropriate promoters, the use of transcription enhancers or translation enhancers. Isolated nucleic acids which serve as promoter or enhancer elements may be introduced in an appropriate position (typically upstream) of a non-heterologous form of a polynucleotide so as to upregulate expression of a nucleic acid encoding the polypeptide of interest. For example, endogenous promoters may be altered in vivo by mutation, deletion, and/or substitution (see, Kmiec, U.S. Pat. No. 5,565,350; Zarling et al., WO9322443), or isolated promoters may be introduced into a plant cell in the proper orientation and distance from a gene of the present invention so as to control the expression of the gene.

[0101] If polypeptide expression is desired, it is generally desirable to include a polyadenylation region at the 3′-end of a polynucleotide coding region. The polyadenylation region can be derived from the natural gene, from a variety of other plant genes, or from T-DNA. The 3′ end sequence to be added may be derived from, for example, the nopaline synthase or octopine synthase genes, or alternatively from another plant gene, or less preferably from any other eukaryotic gene.

[0102] An intron sequence may also be added to the 5′ untranslated region (UTR) or the coding sequence of the partial coding sequence to increase the amount of the mature message that accumulates in the cytosol. Inclusion of a spliceable intron in the transcription unit in both plant and animal expression constructs has been shown to increase gene expression at both the mRNA and protein levels up to 1000-fold (Buchman and Berg (1988) Mol. Cell. biol. 8: 4395-4405; Callis et al. (1987) Genes Dev 1:1183-1200). Such intron enhancement of gene expression is typically greatest when placed near the 5′ end of the transcription unit. Use of the maize introns Adh1-S intron 1, 2, and 6, the Bronze-1 intron are known in the art. For general information see: The Maize Handbook, Chapter 116, Freeling and Walbot, Eds., Springer, N.Y. (1994).

### Decreased Expression

[0103] Reference herein to “decreased expression” or “reduction or substantial elimination” of expression is taken to mean a decrease in endogenous gene expression and/or polypeptide levels and/or polypeptide activity relative to control plants. The reduction or substantial elimination is in increasing order of preference at least 10%, 20%, 30%, 40% or 50%, 60%, 70%, 80%, 85%, 90%, or 95%, 96%, 97%, 98%, 99% or more reduced compared to that of control plants.

[0104] For the reduction or substantial elimination of expression an endogenous gene in a plant, a sufficient length of substantially contiguous nucleotides of a nucleic acid sequence is required. In order to perform gene silencing, this may be as little as 20, 19, 18, 17, 16, 15, 14, 13, 12, 11, 10 or fewer nucleotides, alternatively this may be as much as the entire gene (including the 5′ and/or 3′ UTR, either in part or in whole). The stretch of substantially contiguous nucleotides may be derived from the nucleic acid encoding the protein of interest (target gene), or from any nucleic acid capable of encoding an orthologue, paralogue or homologue of the protein of interest. Preferably, the stretch of substantially contiguous nucleotides is capable of forming hydrogen bonds with the target gene (either sense or antisense strand), more preferably, the stretch of substantially contiguous nucleotides has, in increasing order of preference, 50%, 60%, 70%, 80%, 85%, 90%, 95%, 96%, 97%, 98%, 99%, 100% sequence identity to the target gene (either sense or antisense strand). A nucleic acid sequence encoding a (functional) polypeptide is not a requirement for the various methods discussed herein for the reduction or substantial elimination of expression of an endogenous gene.

[0105] This reduction or substantial elimination of expression may be achieved using routine tools and techniques. A preferred method for the reduction or substantial elimination of endogenous gene expression is by introducing and expressing in a plant a genetic construct into which the nucleic acid (in this case a stretch of substantially contiguous nucleotides derived from the gene of interest, or from any nucleic acid capable of encoding an orthologue, paralogue or homologue of any one of the protein of interest) is cloned as an inverted repeat (in part or completely), separated by a spacer (non-coding DNA).

[0106] In such a preferred method, expression of the endogenous gene is reduced or substantially eliminated through RNA-mediated silencing using an inverted repeat of a nucleic acid or a part thereof (in this case a stretch of substantially contiguous nucleotides derived from the gene of interest, or from any nucleic acid capable of encoding an orthologue, paralogue or homologue of the protein of interest), preferably capable of forming a hairpin structure. The inverted repeat is cloned in an expression vector comprising control sequences. A non-coding DNA nucleic acid sequence (a spacer, for example a matrix attachment region fragment (MAR), an intron, a polylinker, etc.) is located between the two inverted nucleic acids forming the inverted repeat. After transcription of the inverted repeat, a chimeric RNA with a self-complementary structure is formed (partial or complete). This double-stranded RNA structure is referred to as the hairpin RNA (hpRNA). The hpRNA is processed by the plant into siRNAs that are incorporated into an RNA-induced silencing complex (RISC). The RISC further cleaves the mRNA transcripts, thereby substantially reducing the number of mRNA transcripts to be translated into polypeptides. For further general details see for example, Grierson et al. (1998) WO 98/53083; Waterhouse et al. (1999) WO 99/53050).

[0107] Performance of the methods of the invention does not rely on introducing and expressing in a plant a genetic construct into which the nucleic acid is cloned as an inverted repeat, but any one or more of several well-known “gene silencing” methods may be used to achieve the same effects.

[0108] One such method for the reduction of endogenous gene expression is RNA-mediated silencing of gene expression (downregulation). Silencing in this case is triggered in a plant by a double stranded RNA sequence (dsRNA) that is substantially similar to the target endogenous gene. This dsRNA is further processed by the plant into about 20 to about 26 nucleotides called short interfering RNAs (siRNAs). The siRNAs are incorporated into an RNA-induced silencing complex (RISC) that cleaves the mRNA transcript of the endogenous target gene, thereby substantially reducing the number of mRNA transcripts to be translated into a polypeptide. Preferably, the double stranded RNA sequence corresponds to a target gene.

[0109] Another example of an RNA silencing method involves the introduction of nucleic acid sequences or parts thereof (in this case a stretch of substantially contiguous nucleotides derived from the gene of interest, or from any nucleic acid capable of encoding an orthologue, paralogue or homologue of the protein of interest) in a sense orientation into a plant. “Sense orientation” refers to a DNA sequence that is homologous to an mRNA transcript thereof. Introduced into a plant would therefore be at least one copy of the nucleic acid sequence. The additional nucleic acid sequence will reduce expression of the endogenous gene, giving rise to a phenomenon known as co-suppression. The reduction of gene expression will be more pronounced if several additional copies of a nucleic acid sequence are introduced into the plant, as there is a positive correlation between high transcript levels and the triggering of co-suppression.

[0110] Another example of an RNA silencing method involves the use of antisense nucleic acid sequences. An “antisense” nucleic acid sequence comprises a nucleotide sequence that is complementary to a “sense” nucleic acid sequence encoding a protein, i.e. complementary to the coding strand of a double-stranded cDNA molecule or complementary to an mRNA transcript sequence. The antisense nucleic acid sequence is preferably complementary to the endogenous gene to be silenced. The complementarity may be located in the “coding region” and/or in the “non-coding region” of a gene. The term “coding region” refers to a region of the nucleotide sequence comprising codons that are translated into amino acid residues. The term “non-coding region” refers to 5′ and 3′ sequences that flank the coding region that are transcribed but not translated into amino acids (also referred to as 5′ and 3′ untranslated regions).

[0111] Antisense nucleic acid sequences can be designed according to the rules of Watson and Crick base pairing. The antisense nucleic acid sequence may be complementary to the entire nucleic acid sequence (in this case a stretch of substantially contiguous nucleotides derived from the gene of interest, or from any nucleic acid capable of encoding an orthologue, paralogue or homologue of the protein of interest), but may also be an oligonucleotide that is antisense to only a part of the nucleic acid sequence (including the mRNA 5′ and 3′ UTR). For example, the antisense oligonucleotide sequence may be complementary to the region surrounding the translation start site of an mRNA transcript encoding a polypeptide. The length of a suitable antisense oligonucleotide sequence is known in the art and may start from about 50, 45, 40, 35, 30, 25, 20, 15 or 10 nucleotides in length or less. An antisense nucleic acid sequence according to the invention may be constructed using chemical synthesis and enzymatic ligation reactions using methods known in the art. For example, an antisense nucleic acid sequence (e.g., an antisense oligonucleotide sequence) may be chemically synthesized using naturally occurring nucleotides or variously modified nucleotides designed to increase the biological stability of the molecules or to increase the physical stability of the duplex formed between the antisense and sense nucleic acid sequences, e.g., phosphorothioate derivatives and acridine substituted nucleotides may be used. Examples of modified nucleotides that may be used to generate the antisense nucleic acid sequences are well known in the art. Known nucleotide modifications include methylation, cyclization and ‘caps’ and substitution of one or more of the naturally occurring nucleotides with an analogue such as inosine. Other modifications of nucleotides are well known in the art.

[0112] The antisense nucleic acid sequence can be produced biologically using an expression vector into which a nucleic acid sequence has been subcloned in an antisense orientation (i.e., RNA transcribed from the inserted nucleic acid will be of an antisense orientation to a target nucleic acid of interest). Preferably, production of antisense nucleic acid sequences in plants occurs by means of a stably integrated nucleic acid construct comprising a promoter, an operably linked antisense oligonucleotide, and a terminator.

[0113] The nucleic acid molecules used for silencing in the methods of the invention (whether introduced into a plant or generated in situ) hybridize with or bind to mRNA transcripts and/or genomic DNA encoding a polypeptide to thereby inhibit expression of the protein, e.g., by inhibiting transcription and/or translation. The hybridization can be by conventional nucleotide complementarity to form a stable duplex, or, for example, in the case of an antisense nucleic acid sequence which binds to DNA duplexes, through specific interactions in the major groove of the double helix. Antisense nucleic acid sequences may be introduced into a plant by transformation or direct injection at a specific tissue site. Alternatively, antisense nucleic acid sequences can be modified to target selected cells and then administered systemically. For example, for systemic administration, antisense nucleic acid sequences can be modified such that they specifically bind to receptors or antigens expressed on a selected cell surface, e.g., by linking the antisense nucleic acid sequence to peptides or antibodies which bind to cell surface receptors or antigens. The antisense nucleic acid sequences can also be delivered to cells using the vectors described herein.

[0114] According to a further aspect, the antisense nucleic acid sequence is an a-anomeric nucleic acid sequence. An a-anomeric nucleic acid sequence forms specific double-stranded hybrids with complementary RNA in which, contrary to the usual b-units, the strands run parallel to each other (Gaultier et al. (1987) Nucl Ac Res 15: 6625-6641). The antisense nucleic acid sequence may also comprise a 2′-o-methylribonucleotide (Inoue et al. (1987) Nucl Ac Res 15, 6131-6148) or a chimeric RNA-DNA analogue (Inoue et al. (1987) FEBS Lett. 215, 327-330).

[0115] The reduction or substantial elimination of endogenous gene expression may also be performed using ribozymes. Ribozymes are catalytic RNA molecules with ribonuclease activity that are capable of cleaving a single-stranded nucleic acid sequence, such as an mRNA, to which they have a complementary region. Thus, ribozymes (e.g., hammerhead ribozymes (described in Haselhoff and Gerlach (1988) Nature 334, 585-591) can be used to catalytically cleave mRNA transcripts encoding a polypeptide, thereby substantially reducing the number of mRNA transcripts to be translated into a polypeptide. A ribozyme having specificity for a nucleic acid sequence can be designed (see for example: Cech et al. U.S. Pat. No. 4,987,071; and Cech et al. U.S. Pat. No. 5,116,742). Alternatively, mRNA transcripts corresponding to a nucleic acid sequence can be used to select a catalytic RNA having a specific ribonuclease activity from a pool of RNA molecules (Bartel and Szostak (1993) Science 261, 1411-1418). The use of ribozymes for gene silencing in plants is known in the art (e.g., Atkins et al. (1994) WO 94/00012; Lenne et al. (1995) WO 95/03404; Lutziger et al. (2000) WO 00/00619; Prinsen et al. (1997) WO 97/13865 and Scott et al. (1997) WO 97/38116).

[0116] Gene silencing may also be achieved by insertion mutagenesis (for example, T-DNA insertion or transposon insertion) or by strategies as described by, among others, Angell and Baulcombe ((1999) Plant J 20(3): 357-62), (Amplicon VIGS WO 98/36083), or Baulcombe (WO 99/15682).

[0117] Gene silencing may also occur if there is a mutation on an endogenous gene and/or a mutation on an isolated gene/nucleic acid subsequently introduced into a plant. The reduction or substantial elimination may be caused by a non-functional polypeptide. For example, the polypeptide may bind to various interacting proteins; one or more mutation(s) and/or truncation(s) may therefore provide for a polypeptide that is still able to bind interacting proteins (such as receptor proteins) but that cannot exhibit its normal function (such as signalling ligand).

[0118] A further approach to gene silencing is by targeting nucleic acid sequences complementary to the regulatory region of the gene (e.g., the promoter and/or enhancers) to form triple helical structures that prevent transcription of the gene in target cells. See Helene, C., Anticancer Drug Res. 6, 569-84, 1991; Helene et al., Ann. N.Y. Acad. Sci. 660, 27-36 1992; and Maher, L. J. Bioassays 14, 807-15, 1992.

[0119] Other methods, such as the use of antibodies directed to an endogenous polypeptide for inhibiting its function in planta, or interference in the signalling pathway in which a polypeptide is involved, will be well known to the skilled man. In particular, it can be envisaged that manmade molecules may be useful for inhibiting the biological function of a target polypeptide, or for interfering with the signalling pathway in which the target polypeptide is involved.

[0120] Alternatively, a screening program may be set up to identify in a plant population natural variants of a gene, which variants encode polypeptides with reduced activity. Such natural variants may also be used for example, to perform homologous recombination.

[0121] Artificial and/or natural microRNAs (miRNAs) may be used to knock out gene expression and/or mRNA translation. Endogenous miRNAs are single stranded small RNAs of typically 19-24 nucleotides long. They function primarily to regulate gene expression and/or mRNA translation. Most plant microRNAs (miRNAs) have perfect or near-perfect complementarity with their target sequences. However, there are natural targets with up to five mismatches. They are processed from longer non-coding RNAs with characteristic fold-back structures by double-strand specific RNases of the Dicer family. Upon processing, they are incorporated in the RNA-induced silencing complex (RISC) by binding to its main component, an Argonaute protein. MiRNAs serve as the specificity components of RISC, since they base-pair to target nucleic acids, mostly mRNAs, in the cytoplasm. Subsequent regulatory events include target mRNA cleavage and destruction and/or translational inhibition. Effects of miRNA overexpression are thus often reflected in decreased mRNA levels of target genes.

[0122] Artificial microRNAs (amiRNAs), which are typically 21 nucleotides in length, can be genetically engineered specifically to negatively regulate gene expression of single or multiple genes of interest. Determinants of plant microRNA target selection are well known in the art. Empirical parameters for target recognition have been defined and can be used to aid in the design of specific amiRNAs, (Schwab et al., Dev. Cell 8, 517-527, 2005). Convenient tools for design and generation of amiRNAs and their precursors are also available to the public (Schwab et al., Plant Cell 18, 1121-1133, 2006).

[0123] For optimal performance, the gene silencing techniques used for reducing expression in a plant of an endogenous gene requires the use of nucleic acid sequences from monocotyledonous plants for transformation of monocotyledonous plants, and from dicotyledonous plants for transformation of dicotyledonous plants. Preferably, a nucleic acid sequence from any given plant species is introduced into that same species. For example, a nucleic acid sequence from rice is transformed into a rice plant. However, it is not an absolute requirement that the nucleic acid sequence to be introduced originates from the same plant species as the plant in which it will be introduced. It is sufficient that there is substantial homology between the endogenous target gene and the nucleic acid to be introduced.

[0124] Described above are examples of various methods for the reduction or substantial elimination of expression in a plant of an endogenous gene. A person skilled in the art would readily be able to adapt the aforementioned methods for silencing so as to achieve reduction of expression of an endogenous gene in a whole plant or in parts thereof through the use of an appropriate promoter, for example.

### Transformation

[0125] The term “introduction” or “transformation” as referred to herein encompasses the transfer of an exogenous polynucleotide into a host cell, irrespective of the method used for transfer. Plant tissue capable of subsequent clonal propagation, whether by organogenesis or embryogenesis, may be transformed with a genetic construct of the present invention and a whole plant regenerated there from. The particular tissue chosen will vary depending on the clonal propagation systems available for, and best suited to, the particular species being transformed. Exemplary tissue targets include leaf disks, pollen, embryos, cotyledons, hypocotyls, megagametophytes, callus tissue, existing meristematic tissue (e.g., apical meristem, axillary buds, and root meristems), and induced meristem tissue (e.g., cotyledon meristem and hypocotyl meristem). The polynucleotide may be transiently or stably introduced into a host cell and may be maintained non-integrated, for example, as a plasmid. Alternatively, it may be integrated into the host genome. The resulting transformed plant cell may then be used to regenerate a transformed plant in a manner known to persons skilled in the art.

[0126] The transfer of foreign genes into the genome of a plant is called transformation. Transformation of plant species is now a fairly routine technique. Advantageously, any of several transformation methods may be used to introduce the gene of interest into a suitable ancestor cell. The methods described for the transformation and regeneration of plants from plant tissues or plant cells may be utilized for transient or for stable transformation. Transformation methods include the use of liposomes, electroporation, chemicals that increase free DNA uptake, injection of the DNA directly into the plant, particle gun bombardment, transformation using viruses or pollen and microprojection. Methods may be selected from the calcium/polyethylene glycol method for protoplasts (Krens, F. A. et al., (1982) Nature 296, 72-74; Negrutiu I et al. (1987) Plant Mol Biol 8: 363-373); electroporation of protoplasts (Shillito R. D. et al. (1985) Bio/Technol 3, 1099-1102); microinjection into plant material (Crossway A et al., (1986) Mol. Gen. Genet. 202: 179-185); DNA or RNA-coated particle bombardment (Klein T M et al., (1987) Nature 327: 70) infection with (non-integrative) viruses and the like. Transgenic plants, including transgenic crop plants, are preferably produced via Agrobacterium-mediated transformation. An advantageous transformation method is the transformation in planta. To this end, it is possible, for example, to allow the agrobacteria to act on plant seeds or to inoculate the plant meristem with agrobacteria. It has proved particularly expedient in accordance with the invention to allow a suspension of transformed agrobacteria to act on the intact plant or at least on the flower primordia. The plant is subsequently grown on until the seeds of the treated plant are obtained (Clough and Bent, Plant J. (1998) 16, 735-743). Methods for Agrobacterium-mediated transformation of rice include well known methods for rice transformation, such as those described in any of the following: European patent application EP 1198985 A1, Aldemita and Hodges (Planta 199: 612-617, 1996); Chan et al. (Plant Mol Biol 22 (3): 491-506, 1993), Hiei et al. (Plant J 6 (2): 271-282, 1994), which disclosures are incorporated by reference herein as if fully set forth. In the case of corn transformation, the preferred method is as described in either Ishida et al. (Nat. Biotechnol 14(6): 745-50, 1996) or Frame et al. (Plant Physiol 129(1): 13-22, 2002), which disclosures are incorporated by reference herein as if fully set forth. Said methods are further described by way of example in B. Jenes et al., Techniques for Gene Transfer, in: Transgenic Plants, Vol. 1, Engineering and Utilization, eds. S. D. Kung and R. Wu, Academic Press (1993) 128-143 and in Potrykus Annu. Rev. Plant Physiol. Plant Molec. Biol. 42 (1991) 205-225). The nucleic acids or the construct to be expressed is preferably cloned into a vector, which is suitable for transforming Agrobacterium tumefaciens, for example pBin19 (Bevan et al., Nucl. Acids Res. 12 (1984) 8711). Agrobacteria transformed by such a vector can then be used in known manner for the transformation of plants, such as plants used as a model, like Arabidopsis (Arabidopsis thaliana is within the scope of the present invention not considered as a crop plant), or crop plants such as, by way of example, tobacco plants, for example by immersing bruised leaves or chopped leaves in an agrobacterial solution and then culturing them in suitable media. The transformation of plants by means of Agrobacterium tumefaciens is described, for example, by Höfgen and Willmitzer in Nucl. Acid Res. (1988) 16, 9877 or is known inter alia from F. F. White, Vectors for Gene Transfer in Higher Plants; in Transgenic Plants, Vol. 1, Engineering and Utilization, eds. S. D. Kung and R. Wu, Academic Press, 1993, pp. 15-38.

[0127] In addition to the transformation of somatic cells, which then have to be regenerated into intact plants, it is also possible to transform the cells of plant meristems and in particular those cells which develop into gametes. In this case, the transformed gametes follow the natural plant development, giving rise to transgenic plants. Thus, for example, seeds of Arabidopsis are treated with agrobacteria and seeds are obtained from the developing plants of which a certain proportion is transformed and thus transgenic [Feldman, K A and Marks M D (1987). Mol Gen Genet. 208:1-9; Feldmann K (1992). In: C Koncz, N-H Chua and J Shell, eds, Methods in Arabidopsis Research. Word Scientific, Singapore, pp. 274-289]. Alternative methods are based on the repeated removal of the inflorescences and incubation of the excision site in the center of the rosette with transformed agrobacteria, whereby transformed seeds can likewise be obtained at a later point in time (Chang (1994). Plant J. 5: 551-558; Katavic (1994). Mol Gen Genet, 245: 363-370). However, an especially effective method is the vacuum infiltration method with its modifications such as the “floral dip” method. In the case of vacuum infiltration of Arabidopsis, intact plants under reduced pressure are treated with an agrobacterial suspension [Bechthold, N (1993). C R Acad Sci Paris Life Sci, 316: 1194-1199], while in the case of the “floral dip” method the developing floral tissue is incubated briefly with a surfactant-treated agrobacterial suspension [Clough, S J and Bent A F (1998) The Plant J. 16, 735-743]. A certain proportion of transgenic seeds are harvested in both cases, and these seeds can be distinguished from non-transgenic seeds by growing under the above-described selective conditions. In addition the stable transformation of plastids is of advantages because plastids are inherited maternally is most crops reducing or eliminating the risk of transgene flow through pollen. The transformation of the chloroplast genome is generally achieved by a process which has been schematically displayed in Klaus et al., 2004 [Nature Biotechnology 22 (2), 225-229]. Briefly the sequences to be transformed are cloned together with a selectable marker gene between flanking sequences homologous to the chloroplast genome. These homologous flanking sequences direct site specific integration into the plastome. Plastidal transformation has been described for many different plant species and an overview is given in Bock (2001) Transgenic plastids in basic research and plant biotechnology. J Mol. Biol. 2001 Sep. 21; 312 (3):425-38 or Maliga, P (2003) Progress towards commercialization of plastid transformation technology. Trends Biotechnol. 21, 20-28. Further biotechnological progress has recently been reported in form of marker free plastid transformants, which can be produced by a transient co-integrated maker gene (Klaus et al., 2004, Nature Biotechnology 22(2), 225-229).

[0128] The genetically modified plant cells can be regenerated via all methods with which the skilled worker is familiar. Suitable methods can be found in the above-mentioned publications by S. D. Kung and R. Wu, Potrykus or Höfgen and Willmitzer.

[0129] Generally after transformation, plant cells or cell groupings are selected for the presence of one or more markers which are encoded by plant-expressible genes co-transferred with the gene of interest, following which the transformed material is regenerated into a whole plant. To select transformed plants, the plant material obtained in the transformation is, as a rule, subjected to selective conditions so that transformed plants can be distinguished from untransformed plants. For example, the seeds obtained in the above-described manner can be planted and, after an initial growing period, subjected to a suitable selection by spraying. A further possibility consists in growing the seeds, if appropriate after sterilization, on agar plates using a suitable selection agent so that only the transformed seeds can grow into plants. Alternatively, the transformed plants are screened for the presence of a selectable marker such as the ones described above.

[0130] Following DNA transfer and regeneration, putatively transformed plants may also be evaluated, for instance using Southern analysis, for the presence of the gene of interest, copy number and/or genomic organisation. Alternatively or additionally, expression levels of the newly introduced DNA may be monitored using Northern and/or Western analysis, both techniques being well known to persons having ordinary skill in the art.

[0131] The generated transformed plants may be propagated by a variety of means, such as by clonal propagation or classical breeding techniques. For example, a first generation (or T1) transformed plant may be selfed and homozygous second-generation (or T2) transformants selected, and the T2 plants may then further be propagated through classical breeding techniques. The generated transformed organisms may take a variety of forms. For example, they may be chimeras of transformed cells and non-transformed cells; clonal transformants (e.g., all cells transformed to contain the expression cassette); grafts of transformed and untransformed tissues (e.g., in plants, a transformed rootstock grafted to an untransformed scion).

### T-DNA Activation Tagging

[0132] T-DNA activation tagging (Hayashi et al. Science (1992) 1350-1353), involves insertion of T-DNA, usually containing a promoter (may also be a translation enhancer or an intron), in the genomic region of the gene of interest or 10 kb up- or downstream of the coding region of a gene in a configuration such that the promoter directs expression of the targeted gene. Typically, regulation of expression of the targeted gene by its natural promoter is disrupted and the gene falls under the control of the newly introduced promoter. The promoter is typically embedded in a T-DNA. This T-DNA is randomly inserted into the plant genome, for example, through Agrobacterium infection and leads to modified expression of genes near the inserted T-DNA. The resulting transgenic plants show dominant phenotypes due to modified expression of genes close to the introduced promoter.

### Tilling

[0133] The term “TILLING” is an abbreviation of “Targeted Induced Local Lesions In Genomes” and refers to a mutagenesis technology useful to generate and/or identify nucleic acids encoding proteins with modified expression and/or activity. TILLING also allows selection of plants carrying such mutant variants. These mutant variants may exhibit modified expression, either in strength or in location or in timing (if the mutations affect the promoter for example). These mutant variants may exhibit higher activity than that exhibited by the gene in its natural form. TILLING combines high-density mutagenesis with high-throughput screening methods. The steps typically followed in TILLING are: (a) EMS mutagenesis (Redei G P and Koncz C (1992) In Methods in Arabidopsis Research, Koncz C, Chua N H, Schell J, eds. Singapore, World Scientific Publishing Co, pp. 16-82; Feldmann et al., (1994) In Meyerowitz E M, Somerville C R, eds, Arabidopsis. Cold Spring Harbor Laboratory Press, Cold Spring Harbor, N.Y., pp 137-172; Lightner J and Caspar T (1998) In J Martinez-Zapater, J Salinas, eds, Methods on Molecular Biology, Vol. 82. Humana Press, Totowa, N.J., pp 91-104); (b) DNA preparation and pooling of individuals; (c) PCR amplification of a region of interest; (d) denaturation and annealing to allow formation of heteroduplexes; (e) DHPLC, where the presence of a heteroduplex in a pool is detected as an extra peak in the chromatogram; (f) identification of the mutant individual; and (g) sequencing of the mutant PCR product. Methods for TILLING are well known in the art (McCallum et al., (2000) Nat Biotechnol 18: 455-457; reviewed by Stemple (2004) Nat Rev Genet. 5(2): 145-50).

### Homologous Recombination

[0134] Homologous recombination allows introduction in a genome of a selected nucleic acid at a defined selected position. Homologous recombination is a standard technology used routinely in biological sciences for lower organisms such as yeast or the moss Physcomitrella. Methods for performing homologous recombination in plants have been described not only for model plants (Offring a et al. (1990) EMBO J. 9(10): 3077-84) but also for crop plants, for example rice (Terada et al. (2002) Nat Biotech 20(10): 1030-4; lida and Terada (2004) Curr Opin Biotech 15(2): 132-8), and approaches exist that are generally applicable regardless of the target organism (Miller et al, Nature Biotechnol. 25, 778-785, 2007).

### Yield Related Traits

[0135] Yield related traits comprise one or more of early flowering time, yield, biomass, seed yield, early vigour, greenness index, increased growth rate, improved agronomic traits (such as improved Water Use Efficiency (WUE), Nitrogen Use Efficiency (NUE), etc.).

### Yield

[0136] The term “yield” in general means a measurable produce of economic value, typically related to a specified crop, to an area, and to a period of time. Individual plant parts directly contribute to yield based on their number, size and/or weight, or the actual yield is the yield per square meter for a crop and year, which is determined by dividing total production (includes both harvested and appraised production) by planted square meters. The terms “yield” of a plant and “plant yield” are used interchangeably herein and are meant to refer to vegetative biomass such as root and/or shoot biomass, to reproductive organs, and/or to propagules such as seeds of that plant.

[0137] Taking corn as an example, a yield increase may be manifested as one or more of the following: increase in the number of plants established per square meter, an increase in the number of ears per plant, an increase in the number of rows, number of kernels per row, kernel weight, thousand kernel weight, ear length/diameter, increase in the seed filling rate (which is the number of filled seeds divided by the total number of seeds and multiplied by 100), among others. Taking rice as an example, a yield increase may manifest itself as an increase in one or more of the following: number of plants per square meter, number of panicles per plant, panicle length, number of spikelets per panicle, number of flowers (florets) per panicle, increase in the seed filling rate (which is the number of filled seeds divided by the total number of seeds and multiplied by 100), increase in thousand kernel weight, among others. In rice, submergence tolerance may also result in increased yield.

### Early Flowering Time

[0138] Plants having an “early flowering time” as used herein are plants which start to flower earlier than control plants. Hence this term refers to plants that show an earlier start of flowering. Flowering time of plants can be assessed by counting the number of days (“time to flower”) between sowing and the emergence of a first inflorescence. The “flowering time” of a plant can for instance be determined using the method as described in WO 2007/093444.

### Early Vigour

[0139] “Early vigour” refers to active healthy well-balanced growth especially during early stages of plant growth, and may result from increased plant fitness due to, for example, the plants being better adapted to their environment (i.e. optimizing the use of energy resources and partitioning between shoot and root). Plants having early vigour also show increased seedling survival and a better establishment of the crop, which often results in highly uniform fields (with the crop growing in uniform manner, i.e. with the majority of plants reaching the various stages of development at substantially the same time), and often better and higher yield. Therefore, early vigour may be determined by measuring various factors, such as thousand kernel weight, percentage germination, percentage emergence, seedling growth, seedling height, root length, root and shoot biomass and many more.

### Increased Growth Rate

[0140] The increased growth rate may be specific to one or more parts of a plant (including seeds), or may be throughout substantially the whole plant. Plants having an increased growth rate may have a shorter life cycle. The life cycle of a plant may be taken to mean the time needed to grow from a dry mature seed up to the stage where the plant has produced dry mature seeds, similar to the starting material. This life cycle may be influenced by factors such as speed of germination, early vigour, growth rate, greenness index, flowering time and speed of seed maturation. The increase in growth rate may take place at one or more stages in the life cycle of a plant or during substantially the whole plant life cycle. Increased growth rate during the early stages in the life cycle of a plant may reflect enhanced vigour. The increase in growth rate may alter the harvest cycle of a plant allowing plants to be sown later and/or harvested sooner than would otherwise be possible (a similar effect may be obtained with earlier flowering time). If the growth rate is sufficiently increased, it may allow for the further sowing of seeds of the same plant species (for example sowing and harvesting of rice plants followed by sowing and harvesting of further rice plants all within one conventional growing period). Similarly, if the growth rate is sufficiently increased, it may allow for the further sowing of seeds of different plants species (for example the sowing and harvesting of corn plants followed by, for example, the sowing and optional harvesting of soybean, potato or any other suitable plant). Harvesting additional times from the same rootstock in the case of some crop plants may also be possible. Altering the harvest cycle of a plant may lead to an increase in annual biomass production per square meter (due to an increase in the number of times (say in a year) that any particular plant may be grown and harvested). An increase in growth rate may also allow for the cultivation of transgenic plants in a wider geographical area than their wild-type counterparts, since the territorial limitations for growing a crop are often determined by adverse environmental conditions either at the time of planting (early season) or at the time of harvesting (late season). Such adverse conditions may be avoided if the harvest cycle is shortened. The growth rate may be determined by deriving various parameters from growth curves, such parameters may be: T-Mid (the time taken for plants to reach 50% of their maximal size) and T-90 (time taken for plants to reach 90% of their maximal size), amongst others.

### Stress Resistance

[0141] An increase in yield and/or growth rate occurs whether the plant is under non-stress conditions or whether the plant is exposed to various stresses compared to control plants. Plants typically respond to exposure to stress by growing more slowly. In conditions of severe stress, the plant may even stop growing altogether. Mild stress on the other hand is defined herein as being any stress to which a plant is exposed which does not result in the plant ceasing to grow altogether without the capacity to resume growth. Mild stress in the sense of the invention leads to a reduction in the growth of the stressed plants of less than 40%, 35%, 30% or 25%, more preferably less than 20% or 15% in comparison to the control plant under non-stress conditions. Due to advances in agricultural practices (irrigation, fertilization, pesticide treatments) severe stresses are not often encountered in cultivated crop plants. As a consequence, the compromised growth induced by mild stress is often an undesirable feature for agriculture. “Mild stresses” are the everyday biotic and/or abiotic (environmental) stresses to which a plant is exposed. Abiotic stresses may be due to drought or excess water, anaerobic stress, salt stress, chemical toxicity, oxidative stress and hot, cold or freezing temperatures.

[0142] “Biotic stresses” are typically those stresses caused by pathogens, such as bacteria, viruses, fungi, nematodes and insects.

[0143] The “abiotic stress” may be an osmotic stress caused by a water stress, e.g. due to drought, salt stress, or freezing stress. Abiotic stress may also be an oxidative stress or a cold stress. “Freezing stress” is intended to refer to stress due to freezing temperatures, i.e. temperatures at which available water molecules freeze and turn into ice. “Cold stress”, also called “chilling stress”, is intended to refer to cold temperatures, e.g. temperatures below 10°, or preferably below 5° C., but at which water molecules do not freeze. As reported in Wang et al. (Planta (2003) 218: 1-14), abiotic stress leads to a series of morphological, physiological, biochemical and molecular changes that adversely affect plant growth and productivity. Drought, salinity, extreme temperatures and oxidative stress are known to be interconnected and may induce growth and cellular damage through similar mechanisms. Rabbani et al. (Plant Physiol (2003) 133: 1755-1767) describes a particularly high degree of “cross talk” between drought stress and high-salinity stress. For example, drought and/or salinisation are manifested primarily as osmotic stress, resulting in the disruption of homeostasis and ion distribution in the cell. Oxidative stress, which frequently accompanies high or low temperature, salinity or drought stress, may cause denaturing of functional and structural proteins. As a consequence, these diverse environmental stresses often activate similar cell signalling pathways and cellular responses, such as the production of stress proteins, up-regulation of anti-oxidants, accumulation of compatible solutes and growth arrest. The term “non-stress” conditions as used herein are those environmental conditions that allow optimal growth of plants. Persons skilled in the art are aware of normal soil conditions and climatic conditions for a given location. Plants with optimal growth conditions, (grown under non-stress conditions) typically yield in increasing order of preference at least 97%, 95%, 92%, 90%, 87%, 85%, 83%, 80%, 77% or 75% of the average production of such plant in a given environment. Average production may be calculated on harvest and/or season basis. Persons skilled in the art are aware of average yield productions of a crop.

[0144] In particular, the methods of the present invention may be performed under non-stress conditions. In an example, the methods of the present invention may be performed under non-stress conditions such as mild drought to give plants having increased yield relative to control plants.

[0145] In another embodiment, the methods of the present invention may be performed under stress conditions.

[0146] In an example, the methods of the present invention may be performed under stress conditions such as drought to give plants having increased yield relative to control plants. In another example, the methods of the present invention may be performed under stress conditions such as nutrient deficiency to give plants having increased yield relative to control plants.

[0147] Nutrient deficiency may result from a lack of nutrients such as nitrogen, phosphates and other phosphorous-containing compounds, potassium, calcium, magnesium, manganese, iron and boron, amongst others.

[0148] In yet another example, the methods of the present invention may be performed under stress conditions such as salt stress to give plants having increased yield relative to control plants. The term salt stress is not restricted to common salt (NaCl), but may be any one or more of: NaCl, KCl, LiCl, MgCl₂, CaCl₂, amongst others.

[0149] In yet another example, the methods of the present invention may be performed under stress conditions such as cold stress or freezing stress to give plants having increased yield relative to control plants.

### Increase/Improve/Enhance

[0150] The terms “increase”, “improve” or “enhance” are interchangeable and shall mean in the sense of the application at least a 3%, 4%, 5%, 6%, 7%, 8%, 9% or 10%, preferably at least 15% or 20%, more preferably 25%, 30%, 35% or 40% more yield and/or growth in comparison to control plants as defined herein.

### Seed Yield

[0151] Increased seed yield may manifest itself as one or more of the following:
[0152] (a) an increase in seed biomass (total seed weight) which may be on an individual seed basis and/or per plant and/or per square meter;
[0153] (b) increased number of flowers per plant;
[0154] (c) increased number of seeds and/or increased number of filled seeds;
[0155] (d) increased seed filling rate (which is expressed as the ratio between the number of filled seeds divided by the total number of seeds);
[0156] (e) increased harvest index, which is expressed as a ratio of the yield of harvestable parts, such as seeds, divided by the biomass of aboveground plant parts; and
[0157] (f) increased thousand kernel weight (TKW), which is extrapolated from the number of filled seeds counted and their total weight. An increased TKW may result from an increased seed size and/or seed weight, and may also result from an increase in embryo and/or endosperm size.

[0158] An increase in seed yield may also be manifested as an increase in seed size and/or seed volume. Furthermore, an increase in seed yield may also manifest itself as an increase in seed area and/or seed length and/or seed width and/or seed perimeter.

### Greenness Index

[0159] The “greenness index” as used herein is calculated from digital images of plants. For each pixel belonging to the plant object on the image, the ratio of the green value versus the red value (in the RGB model for encoding color) is calculated. The greenness index is expressed as the percentage of pixels for which the green-to-red ratio exceeds a given threshold. Under normal growth conditions, under salt stress growth conditions, and under reduced nutrient availability growth conditions, the greenness index of plants is measured in the last imaging before flowering. In contrast, under drought stress growth conditions, the greenness index of plants is measured in the first imaging after drought.

### Biomass

[0160] The term “biomass” as used herein is intended to refer to the total weight of a plant. Within the definition of biomass, a distinction may be made between the biomass of one or more parts of a plant, which may include:
[0161] aboveground (harvestable) parts such as but not limited to shoot biomass, seed biomass, leaf biomass, etc. and/or
[0162] (harvestable) parts below ground, such as but not limited to root biomass, etc., and/or
[0163] vegetative biomass such as root biomass, shoot biomass, etc., and/or
[0164] reproductive organs, and/or
[0165] propagules such as seed.

### Marker Assisted Breeding

[0166] Such breeding programmes sometimes require introduction of allelic variation by mutagenic treatment of the plants, using for example EMS mutagenesis; alternatively, the programme may start with a collection of allelic variants of so called “natural” origin caused unintentionally. Identification of allelic variants then takes place, for example, by PCR. This is followed by a step for selection of superior allelic variants of the sequence in question and which give increased yield. Selection is typically carried out by monitoring growth performance of plants containing different allelic variants of the sequence in question. Growth performance may be monitored in a greenhouse or in the field. Further optional steps include crossing plants in which the superior allelic variant was identified with another plant. This could be used, for example, to make a combination of interesting phenotypic features.

### Use as Probes in (Gene Mapping)

[0167] Use of nucleic acids encoding the protein of interest for genetically and physically mapping the genes requires only a nucleic acid sequence of at least 15 nucleotides in length. These nucleic acids may be used as restriction fragment length polymorphism (RFLP) markers. Southern blots (Sambrook J, Fritsch E F and Maniatis T (1989) Molecular Cloning, A Laboratory Manual) of restriction-digested plant genomic DNA may be probed with the nucleic acids encoding the protein of interest. The resulting banding patterns may then be subjected to genetic analyses using computer programs such as MapMaker (Lander et al. (1987) Genomics 1: 174-181) in order to construct a genetic map. In addition, the nucleic acids may be used to probe Southern blots containing restriction endonuclease-treated genomic DNAs of a set of individuals representing parent and progeny of a defined genetic cross. Segregation of the DNA polymorphisms is noted and used to calculate the position of the nucleic acid encoding the protein of interest in the genetic map previously obtained using this population (Botstein et al. (1980) Am. J. Hum. Genet. 32:314-331).

[0168] The production and use of plant gene-derived probes for use in genetic mapping is described in Bernatzky and Tanksley (1986) Plant Mol. Biol. Reporter 4: 37-41. Numerous publications describe genetic mapping of specific cDNA clones using the methodology outlined above or variations thereof. For example, F2 intercross populations, backcross populations, randomly mated populations, near isogenic lines, and other sets of individuals may be used for mapping. Such methodologies are well known to those skilled in the art.

[0169] The nucleic acid probes may also be used for physical mapping (i.e., placement of sequences on physical maps; see Hoheisel et al. In: Non-mammalian Genomic Analysis: A Practical Guide, Academic press 1996, pp. 319-346, and references cited therein).

[0170] In another embodiment, the nucleic acid probes may be used in direct fluorescence in situ hybridisation (FISH) mapping (Trask (1991) Trends Genet. 7:149-154). Although current methods of FISH mapping favour use of large clones (several kb to several hundred kb; see Laan et al. (1995) Genome Res. 5:13-20), improvements in sensitivity may allow performance of FISH mapping using shorter probes.

[0171] A variety of nucleic acid amplification-based methods for genetic and physical mapping may be carried out using the nucleic acids. Examples include allele-specific amplification (Kazazian (1989) J. Lab. Clin. Med. 11:95-96), polymorphism of PCR-amplified fragments (CAPS; Sheffield et al. (1993) Genomics 16:325-332), allele-specific ligation (Landegren et al. (1988) Science 241:1077-1080), nucleotide extension reactions (Sokolov (1990) Nucleic Acid Res. 18:3671), Radiation Hybrid Mapping (Walter et al. (1997) Nat. Genet. 7:22-28) and Happy Mapping (Dear and Cook (1989) Nucleic Acid Res. 17:6795-6807). For these methods, the sequence of a nucleic acid is used to design and produce primer pairs for use in the amplification reaction or in primer extension reactions. The design of such primers is well known to those skilled in the art. In methods employing PCR-based genetic mapping, it may be necessary to identify DNA sequence differences between the parents of the mapping cross in the region corresponding to the instant nucleic acid sequence. This, however, is generally not necessary for mapping methods.

### Plant

[0172] The term “plant” as used herein encompasses whole plants, ancestors and progeny of the plants and plant parts, including seeds, shoots, stems, leaves, roots (including tubers), flowers, and tissues and organs, wherein each of the aforementioned comprise the gene/nucleic acid of interest. The term “plant” also encompasses plant cells, suspension cultures, callus tissue, embryos, meristematic regions, gametophytes, sporophytes, pollen and microspores, again wherein each of the aforementioned comprises the gene/nucleic acid of interest.

[0173] Plants that are particularly useful in the methods of the invention include all plants which belong to the superfamily Viridiplantae, in particular monocotyledonous and dicotyledonous plants including fodder or forage legumes, ornamental plants, food crops, trees or shrubs selected from the list comprising Acer spp., Actinidia spp., Abelmoschus spp., Agave sisalana, Agropyron spp., Agrostis stolonifera, Allium spp., Amaranthus spp., Ammophila arenaria, Ananas comosus, Annona spp., Apium graveolens, Arachis spp, Artocarpus spp., Asparagus officinalis, Avena spp. (e.g. Avena sativa, Avena fatua, Avena byzantina, Avena fatua var. sativa, Avena hybrida), Averrhoa carambola, Bambusa sp., Benincasa hispida, Bertholletia excelsea, Beta vulgaris, Brassica spp. (e.g. Brassica napus, Brassica rapa ssp. [canola, oilseed rape, turnip rape]), Cadaba farinosa, Camellia sinensis, Canna indica, Cannabis sativa, Capsicum spp., Carex elata, Carica papaya, Carissa macrocarpa, Carya spp., Carthamus tinctorius, Castanea spp., Ceiba pentandra, Cichorium endivia, Cinnamomum spp., Citrullus lanatus, Citrus spp., Cocos spp., Coffea spp., Colocasia esculenta, Cola spp., Corchorus sp., Coriandrum sativum, Corylus spp., Crataegus spp., Crocus sativus, Cucurbita spp., Cucumis spp., Cynara spp., Daucus carota, Desmodium spp., Dimocarpus longan, Dioscorea spp., Diospyros spp., Echinochloa spp., Elaeis (e.g. Elaeis guineensis, Elaeis oleifera), Eleusine coracana, Eragrostis tef, Erianthus sp., Eriobotrya japonica, Eucalyptus sp., Eugenia uniflora, Fagopyrum spp., Fagus spp., Festuca arundinacea, Ficus carica, Fortunella spp., Fragaria spp., Ginkgo biloba, Glycine spp. (e.g. Glycine max, Soja hispida or Soja max), Gossypium hirsutum, Helianthus spp. (e.g. Helianthus annuus), Hemerocallis fulva, Hibiscus spp., Hordeum spp. (e.g. Hordeum vulgare), Ipomoea batatas, Juglans spp., Lactuca sativa, Lathyrus spp., Lens culinaris, Linum usitatissimum, Litchi chinensis, Lotus spp., Luffa acutangula, Lupinus spp., Luzula sylvatica, Lycopersicon spp. (e.g. Lycopersicon esculentum, Lycopersicon lycopersicum, Lycopersicon pyriforme), Macrotyloma spp., Malus spp., Malpighia emarginata, Mammea americana, Mangifera indica, Manihot spp., Manilkara zapota, Medicago sativa, Melilotus spp., Mentha spp., Miscanthus sinensis, Momordica spp., Morus nigra, Musa spp., Nicotiana spp., Olea spp., Opuntia spp., Ornithopus spp., Oryza spp. (e.g. Oryza sativa, Oryza latifolia), Panicum miliaceum, Panicum virgatum, Passiflora edulis, Pastinaca sativa, Pennisetum sp., Persea spp., Petroselinum crispum, Phalaris arundinacea, Phaseolus spp., Phleum pratense, Phoenix spp., Phragmites australis, Physalis spp., Pinus spp., Pistacia vera, Pisum spp., Poa spp., Populus spp., Prosopis spp., Prunus spp., Psidium spp., Punica granatum, Pyrus communis, Quercus spp., Raphanus sativus, Rheum rhabarbarum, Ribes spp., Ricinus communis, Rubus spp., Saccharum spp., Salix sp., Sambucus spp., Secale cereale, Sesamum spp., Sinapis sp., Solanum spp. (e.g. Solanum tuberosum, Solanum integrifolium or Solanum lycopersicum), Sorghum bicolor, Spinacia spp., Syzygium spp., Tagetes spp., Tamarindus indica, Theobroma cacao, Trifolium spp., Tripsacum dactyloides, Triticosecale rimpaui, Triticum spp. (e.g. Triticum aestivum, Triticum durum, Triticum turgidum, Triticum hybernum, Triticum macha, Triticum sativum, Triticum monococcum or Triticum vulgare), Tropaeolum minus, Tropaeolum majus, Vaccinium spp., Vicia spp., Vigna spp., Viola odorata, Vitis spp., Zea mays, Zizania palustris, Ziziphus spp., amongst others.

### Control Plant(s)

[0174] The choice of suitable control plants is a routine part of an experimental setup and may include corresponding wild type plants or corresponding plants without the gene of interest. The control plant is typically of the same plant species or even of the same variety as the plant to be assessed. The control plant may also be a nullizygote of the plant to be assessed. Nullizygotes are individuals missing the transgene by segregation. A “control plant” as used herein refers not only to whole plants, but also to plant parts, including seeds and seed parts.

### DETAILED DESCRIPTION OF THE INVENTION

[0175] Surprisingly, it has now been found that modulating expression in a plant of a nucleic acid encoding a FSM1-like polypeptide gives plants having enhanced yield-related traits relative to control plants. According to a first embodiment, the present invention provides a method for enhancing yield-related traits in plants relative to control plants, comprising modulating expression in a plant of a nucleic acid encoding a FSM1-like polypeptide and optionally selecting for plants having enhanced yield-related traits.

[0176] The invention also provides hitherto unknown FSM1-like-encoding nucleic acids and FSM1-like polypeptides useful for conferring enhanced yield-related traits in plants relative to control plants.

[0177] According to a further embodiment of the present invention, there is therefore provided an isolated nucleic acid molecule selected from:
[0178] (i) a nucleic acid represented by any of SEQ ID NO: 17, SEQ ID NO: 239, SEQ ID NO: 259, SEQ ID NO: 261, SEQ ID NO: 265, or SEQ ID NO: 277;
[0179] (ii) the complement of a nucleic acid represented by any of SEQ ID NO: 17, SEQ ID NO: 239, SEQ ID NO: 259, SEQ ID NO: 261, SEQ ID NO: 265, or SEQ ID NO: 277;
[0180] (iii) a nucleic acid encoding a FSM1-like polypeptide, comprising a MYB/SANT domain and having in increasing order of preference at least 50%, 51%, 52%, 53%, 54%, 55%, 56%, 57%, 58%, 59%, 60%, 61%, 62%, 63%, 64%, 65%, 66%, 67%, 68%, 69%, 70%, 71%, 72%, 73%, 74%, 75%, 76%, 77%, 78%, 79%, 80%, 81%, 82%, 83%, 84%, 85%, 86%, 87%, 88%, 89%, 90%, 91%, 92%, 93%, 94%, 95%, 96%, 97%, 98%, or 99% sequence identity to the amino acid sequence represented by any one of SEQ ID NO: 18, SEQ ID NO: 240, SEQ ID NO: 260, SEQ ID NO: 262, SEQ ID NO: 266, or SEQ ID NO: 278, and additionally or alternatively comprising one or more motifs having, in increasing order of preference, 4, or less than 4, less than 3, less than 2, or no substitutions (sequence mismatches) to any one or more of the motifs given in SEQ ID NO: 283 to SEQ ID NO: 288, and further preferably conferring enhanced yield-related traits relative to control plants.
[0181] (iv) a nucleic acid molecule which hybridizes with a nucleic acid molecule of (i) to (iii) under high stringency hybridization conditions and preferably confers enhanced yield-related traits relative to control plants.

[0182] According to a further embodiment of the present invention, there is also provided an isolated polypeptide selected from:
[0183] (i) an amino acid sequence represented by SEQ ID NO: 18, SEQ ID NO: 240, SEQ ID NO: 260, SEQ ID NO: 262, SEQ ID NO: 266, or SEQ ID NO: 278;
[0184] (ii) an amino acid sequence, comprising a MYB/SANT domain and having, in increasing order of preference, at least 50%, 51%, 52%, 53%, 54%, 55%, 56%, 57%, 58%, 59%, 60%, 61%, 62%, 63%, 64%, 65%, 66%, 67%, 68%, 69%, 70%, 71%, 72%, 73%, 74%, 75%, 76%, 77%, 78%, 79%, 80%, 81%, 82%, 83%, 84%, 85%, 86%, 87%, 88%, 89%, 90%, 91%, 92%, 93%, 94%, 95%, 96%, 97%, 98%, or 99% sequence identity to the amino acid sequence represented by SEQ ID NO: 18, SEQ ID NO: 240, SEQ ID NO: 260, SEQ ID NO: 262, SEQ ID NO: 266, or SEQ ID NO: 278, and additionally or alternatively comprising one or more motifs having, in increasing order of preference, 4 or less than 4, less than 3, less than 2, or no substitutions (sequence mismatches) to any of the motifs given in SEQ ID NO: 283 to SEQ ID NO: 288, and further preferably conferring enhanced yield-related traits relative to control plants;
[0185] (iii) derivatives of any of the amino acid sequences given in (i) or (ii) above.

[0186] Furthermore, it has now surprisingly been found that modulating expression in a plant of a nucleic acid encoding a PIF3-like polypeptide gives plants having enhanced yield-related traits relative to control plants. According to a first embodiment, the present invention provides a method for enhancing yield-related traits in plants relative to control plants, comprising modulating expression in a plant of a nucleic acid encoding a PIF3-like polypeptide and optionally selecting for plants having enhanced yield-related traits.

[0187] The invention also provides hitherto unknown PIF3-like-encoding nucleic acids and PIF3-like polypeptides useful for conferring enhanced yield-related traits in plants relative to control plants.

[0188] According to a further embodiment of the present invention, there is therefore provided an isolated nucleic acid molecule comprising any one of the following features selected from:
[0189] (i) a nucleic acid represented by SEQ ID NO: 356;
[0190] (ii) the complement of a nucleic acid represented by SEQ ID NO: 356;
[0191] (iii) a nucleic acid encoding a PIF3-like polypeptide having in increasing order of preference at least 50%, 51%, 52%, 53%, 54%, 55%, 56%, 57%, 58%, 59%, 60%, 61%, 62%, 63%, 64%, 65%, 66%, 67%, 68%, 69%, 70%, 71%, 72%, 73%, 74%, 75%, 76%, 77%, 78%, 79%, 80%, 81%, 82%, 83%, 84%, 85%, 86%, 87%, 88%, 89%, 90%, 91%, 92%, 93%, 94%, 95%, 96%, 97%, 98%, or 99% sequence identity to the amino acid sequence represented by SEQ ID NO: 357, and additionally or alternatively comprising one or more motifs having in increasing order of preference less than 5, less than 4, less than 3, less than 2, or less than 1 substitutions (sequence mismatches) compared to any one or more of the motifs given in SEQ ID NO: 358 to SEQ ID NO: 363, and further preferably conferring enhanced yield-related traits relative to control plants.
[0192] (iv) a nucleic acid molecule which hybridizes with a nucleic acid molecule of (i) to (iii) under high stringency hybridization conditions and preferably confers enhanced yield-related traits relative to control plants.

[0193] According to a further embodiment of the present invention, there is also provided an isolated polypeptide selected from:
[0194] (i) an amino acid sequence represented by SEQ ID NO: 357;
[0195] (ii) an amino acid sequence having, in increasing order of preference, at least 50%, 51%, 52%, 53%, 54%, 55%, 56%, 57%, 58%, 59%, 60%, 61%, 62%, 63%, 64%, 65%, 66%, 67%, 68%, 69%, 70%, 71%, 72%, 73%, 74%, 75%, 76%, 77%, 78%, 79%, 80%, 81%, 82%, 83%, 84%, 85%, 86%, 87%, 88%, 89%, 90%, 91%, 92%, 93%, 94%, 95%, 96%, 97%, 98%, or 99% sequence identity to the amino acid sequence represented by SEQ ID NO: 357, and additionally or alternatively comprising one or more motifs having in increasing order of preference less than 5, less than 4, less than 3, less than 2, or less than 1 substitutions (sequence mismatches) compared to any one or more of the motifs given in SEQ ID NO: 358 to SEQ ID NO: 363, and further preferably conferring enhanced yield-related traits relative to control plants;
[0196] (iii) derivatives of any of the amino acid sequences given in (i) or (ii) above.

[0197] Furthermore, it has now surprisingly been found that modulating expression in a plant of a nucleic acid encoding a UROD polypeptide gives plants having enhanced yield-related traits relative to control plants. According to a first embodiment, the present invention provides a method for enhancing yield-related traits in plants relative to control plants, comprising modulating expression in a plant of a nucleic acid encoding a UROD polypeptide and optionally selecting for plants having enhanced yield-related traits.

[0198] Furthermore, it has now surprisingly been found that modulating expression in a plant of a nucleic acid encoding an AS-MTT polypeptide gives plants having enhanced yield-related traits relative to control plants. According to a first embodiment, the present invention provides a method for enhancing yield-related traits in plants relative to control plants, comprising modulating expression in a plant of a nucleic acid encoding an AS-MTT polypeptide and optionally selecting for plants having enhanced yield-related traits.

[0199] Furthermore, it has now surprisingly been found that modulating expression in a plant of a nucleic acid encoding an EXO-1 polypeptide gives plants having enhanced yield-related traits relative to control plants. According to a first embodiment, the present invention provides a method for enhancing yield-related traits in plants relative to control plants, comprising modulating expression in a plant of a nucleic acid encoding an EXO-1 polypeptide and optionally selecting for plants having enhanced yield-related traits.

[0200] The invention also provides hitherto unknown EXO-1-encoding nucleic acids and EXO-1 polypeptides useful for conferring enhanced yield-related traits in plants relative to control plants.

[0201] Furthermore, it has now surprisingly been found that modulating expression in a plant of a nucleic acid encoding a YiAP2 polypeptide gives plants having enhanced yield-related traits relative to control plants. According to a first embodiment, the present invention provides a method for enhancing yield-related traits in plants relative to control plants, comprising modulating expression in a plant of a nucleic acid encoding a YiAP2 polypeptide and optionally selecting for plants having enhanced yield-related traits.

[0202] A preferred method for modulating (preferably, increasing) expression of a nucleic acid encoding a FSM1-like (Fruit Sant/Myb) polypeptide, or a PIF3-like (Phytochrome Interacting Factor 3) polypeptide, or a UROD polypeptide, or an AS-MTT (Abiotic Stress Membrane Tethered Transcription factor) polypeptide, or an EXO-1 polypeptide, or a YiAP2 polypeptide, is by introducing and expressing in a plant a nucleic acid encoding a FSM1-like (Fruit Sant/Myb) polypeptide, or a PIF3-like (Phytochrome Interacting Factor 3) polypeptide, or a UROD polypeptide, or an AS-MTT (Abiotic Stress Membrane Tethered Transcription factor) polypeptide, or an EXO-1 polypeptide, or a YiAP2 polypeptide.

[0203] In one embodiment, a “protein useful in the methods of the invention” is taken to mean a FSM1-like polypeptide as defined herein. In another embodiment, “nucleic acid useful in the methods of the invention” is taken to mean a nucleic acid capable of encoding such a FSM1-like polypeptide. The nucleic acid to be introduced into a plant (and therefore useful in performing the methods of the invention) is any nucleic acid encoding the type of protein which will now be described, hereafter also named “FSM1-like nucleic acid” or “FSM1-like gene”.

[0204] A “FSM1-like polypeptide” as defined herein refers to any polypeptide comprising a MYB/SANT domain (SMART accession SM00717, Pfam accession PF00249).

[0205] Additionally or alternatively, the FSM1-like protein comprises one or more of the following motifs:

Motif 1 (SEQ ID NO: 283):
W[TS][PA]K[QE]NK[LA]FE[RK]ALAVYD[KR][DE]TPDR
W[HSQ]N[VI]A[RK]A
Motif 2 (SEQ ID NO: 284):
GGK[ST][AV][ED]EV[KR]RHYE[IL]L
Motif 3 (SEQ ID NO: 285):
D[VL][KF][HF]I[ED][SN]G[RM]VPFP[NK]Y.

[0206] These motifs were derived using the MEME algorithm (Bailey and Elkan, Proceedings of the Second International Conference on Intelligent Systems for Molecular Biology, pp. 28-36, AAAI Press, Menlo Park, Calif., 1994.), MEME motifs represent the amino acid residues that are present in at least 80% of the FSM1-like proteins given in the sequence listing. The location of the motifs is shown in FIG. 1 (representing the protein sequence of SEQ ID NO: 2).

[0207] Alternatively or additionally, the FSM1-like polypeptide also comprises one or more of the following motifs:
[0208] Motif 4 (SEQ ID NO: 286): W(T/S)(A/V/T)(K/Q)(E/Q/D)(N/S)K(D/A)FEX(A/V)LA(E/V/T) (F/Y)D(K/R/Q)(D/E)(T/S)(P/A/R/C)(E/D/N)RWX(N/D)VA(R/K/Q/H)(A/V)(V/I)(G/E/A) wherein X on position 11 can be any amino acid, preferably one of E, R, K, S, Q, and wherein X on position 25 can be any amino acid, preferably one of S, A, Y, H, Q, K Motif 5 (SEQ ID NO: 287): T(V/P/A/T)(E/D)(E/D)(V/A)KX(H/Q)Y(E/D)(V/I/L/H)L(L/V) wherein X on position 7 can be any amino acid, preferably one of K, R, Q, H, S Motif 6 (SEQ ID NO: 288): I(E/D)(S/N)(G/D)XV(P/A)(L/F/Y)P wherein X on position 5 can be any amino acid, preferably one of K, Q, R, H, M
   More preferably, the FSM1-like polypeptide comprises in increasing order of preference, at least 2, at least 3, at least 4, at least 5, or all 6 of the above motifs.

[0209] Additionally or alternatively, the homologue of a FSM1-like protein has in increasing order of preference at least 25%, 26%, 27%, 28%, 29%, 30%, 31%, 32%, 33%, 34%, 35%, 36%, 37%, 38%, 39%, 40%, 41%, 42%, 43%, 44%, 45%, 46%, 47%, 48%, 49%, 50%, 51%, 52%, 53%, 54%, 55%, 56%, 57%, 58%, 59%, 60%, 61%, 62%, 63%, 64%, 65%, 66%, 67%, 68%, 69%, 70%, 71%, 72%, 73%, 74%, 75%, 76%, 77%, 78%, 79%, 80%, 81%, 82%, 83%, 84%, 85%, 86%, 87%, 88%, 89%, 90%, 91%, 92%, 93%, 94%, 95%, 96%, 97%, 98%, or 99% overall sequence identity to the amino acid represented by SEQ ID NO: 2, provided that the homologous protein comprises a MYB/SANT domain and preferably also any one or more of the conserved motifs as outlined above. The overall sequence identity is determined using a global alignment algorithm, such as the Needleman Wunsch algorithm in the program GAP (GCG Wisconsin Package, Accelrys), preferably with default parameters and preferably with sequences of mature proteins (i.e. without taking into account secretion signals or transit peptides). Compared to overall sequence identity, the sequence identity will generally be higher when only conserved domains or motifs are considered. Preferably the motifs in a FSM1-like polypeptide have, in increasing order of preference, at least 70%, 71%, 72%, 73%, 74%, 75%, 76%, 77%, 78%, 79%, 80%, 81%, 82%, 83%, 84%, 85%, 86%, 87%, 88%, 89%, 90%, 91%, 92%, 93%, 94%, 95%, 96%, 97%, 98%, or 99% sequence identity to any one or more of the motifs represented by SEQ ID NO: 283 to SEQ ID NO: 288 (Motifs 1 to 6).

[0210] Preferably, the polypeptide sequence which when used in the construction of a phylogenetic tree, such as the one depicted in FIG. 3, clusters with the group of FSM1-like polypeptides comprising the amino acid sequence represented by SEQ ID NO: 2 rather than with other MYB proteins.

[0211] In another embodiment, a “protein useful in the methods of the invention” is taken to mean a PIF3-like polypeptide as defined herein. I another embodiment a “nucleic acid useful in the methods of the invention” is taken to mean a nucleic acid capable of encoding such a PIF3-like polypeptide. The nucleic acid to be introduced into a plant (and therefore useful in performing the methods of the invention) is any nucleic acid encoding the type of protein which will now be described, hereafter also named “PIF3-like nucleic acid” or “PIF3-like gene”.

[0212] A “PIF3-like polypeptide” as defined herein refers to SEQ ID NO: 293 and any homologous (preferably orthologous) polypeptide comprising a Helix-Loop-Helix domain (Pfam accession PF00010, InterPro IPRO01092). Additionally or alternatively, the PIF3-like polypeptide comprises one or more of the following motifs:

Motif 7 (SEQ ID NO: 338):
[RKG][STG][TG][TS][TAS][KR]R[RS]RAAEVHNLSERRR
RDRINEKM[RK]ALQELIP[HNR]CNK[TS]DKAS[MI]
LDEAIEYLKSLQ[LM]Q[VL]Q[IM]M[WS]MG[SGC]G
Motif 8 (SEQ ID NO: 339):
[LI]x[PE][DE][ND][EGD]LVELLW[QCE]NG[QHG]VV
wherein x represents any amino acid.

[0213] These motifs were derived from MEME motifs (Bailey and Elkan, Proceedings of the Second International Conference on Intelligent Systems for Molecular Biology, pp. 28-36, AAAI Press, Menlo Park, Calif., 1994). MEME motifs represent the amino acid residues that are present in at least 80% of the FSM1-like proteins given in the sequence listing. The location of the motifs is shown in FIG. 1 (representing the protein sequence of SEQ ID NO: 293).

[0214] Additionally or alternatively, the PIF3-like polypeptide comprises one or more of the following motifs:

Motif 9 (SEQ ID NO: 340):
[E/D/N/G]L[V/I]EL[L/Q]W[R/Q/K/C][D/N]G[Q/E/H]VV
Motif 10 (SEQ ID NO: 341):
RAAEVHN
Motif 11 (SEQ ID NO: 342):
SERRRRDRINE
Motif 12 (SEQ ID NO: 343):
TDKAS[M/I]L[D/E]EAI[E/D]YLKSLQ[L/M/F]QLQ[M/V/L]
MWMG

[0215] Preferably, the PIF3-like polypeptide comprises in increasing order of preference, at least 1, at least 2, or at least 3 of the above motifs.

[0216] Additionally or alternatively, the homologue of a PIF3-like protein has in increasing order of preference at least 25%, 26%, 27%, 28%, 29%, 30%, 31%, 32%, 33%, 34%, 35%, 36%, 37%, 38%, 39%, 40%, 41%, 42%, 43%, 44%, 45%, 46%, 47%, 48%, 49%, 50%, 51%, 52%, 53%, 54%, 55%, 56%, 57%, 58%, 59%, 60%, 61%, 62%, 63%, 64%, 65%, 66%, 67%, 68%, 69%, 70%, 71%, 72%, 73%, 74%, 75%, 76%, 77%, 78%, 79%, 80%, 81%, 82%, 83%, 84%, 85%, 86%, 87%, 88%, 89%, 90%, 91%, 92%, 93%, 94%, 95%, 96%, 97%, 98%, or 99% overall sequence identity to the amino acid represented by SEQ ID NO: 293, provided that the homologous protein comprises any one or more of the conserved motifs as outlined above. The overall sequence identity is determined using a global alignment algorithm, such as the Needleman Wunsch algorithm in the program GAP (GCG Wisconsin Package, Accelrys), preferably with default parameters and preferably with sequences of mature proteins (i.e. without taking into account secretion signals or transit peptides). Compared to overall sequence identity, the sequence identity will generally be higher when only conserved domains or motifs are considered. Preferably the motifs in a PIF3-like polypeptide have, in increasing order of preference, at least 70%, 71%, 72%, 73%, 74%, 75%, 76%, 77%, 78%, 79%, 80%, 81%, 82%, 83%, 84%, 85%, 86%, 87%, 88%, 89%, 90%, 91%, 92%, 93%, 94%, 95%, 96%, 97%, 98%, or 99% sequence identity to any one or more of the motifs represented by SEQ ID NO: 338 to SEQ ID NO: 343 (Motifs 7 to 12).

[0217] Preferably, the polypeptide sequence which when used in the construction of a phylogenetic tree, such as the one depicted in FIG. 8, clusters with the group of PIF3-like polypeptides (eventually refer to a specific group defined in the literature) comprising the amino acid sequence represented by SEQ ID NO: 293 rather than with any other group of bHLH proteins.

[0218] In another embodiment, a “protein useful in the methods of the invention” is taken to mean a UROD polypeptide as defined herein. In another embodiment, a “nucleic acid useful in the methods of the invention” is taken to mean a nucleic acid capable of encoding such a UROD polypeptide. The nucleic acid to be introduced into a plant (and therefore useful in performing the methods of the invention) is any nucleic acid encoding the type of protein which will now be described, hereinafter also named “UROD nucleic acid” or “UROD gene”.

[0219] A “UROD polypeptide” as defined herein refers to any polypeptide having uroporphyrinogen III decarboxylase activity, meaning any polypeptide having the capability to convert uroporphyrinogen III into coporphyrinogen.

[0220] Phylogenetic analysis shows that UROD polypeptides can be separated into two main clades: photosynthetic and non-photosynthetic (see FIGS. 12 and 13). Preferably, UROD polypeptides useful in the methods of the invention belong to the photosynthetic Glade. The photosynthetic Glade can be further subdivided into four main sub-clades: HEM1, HEM2, CYANO and others. Most preferably, UROD polypeptides useful in the methods of the invention belong to the HEM1 sub-Glade.

[0221] UROD polypeptides typically comprise one or more of the following domains:

| | | Domain ID | Short | |
|---|---|---|---|---|
| Method | | and name | Name | Location |
| Interpro | IPR000257 | Uroporphyrinogen | URO-D | 4.8e−146 |
| | | decarboxylase | | [50-390]T |
| PFAM | PF01208 | Uroporphyrinogen | UROD_1 | NA |
| | | decarboxylase | | [68-77] |
| PROSITE | PS00907 | Uroporphyrinogen | UROD_2 | 8e−5[187- |
| | | decarboxylase | | 203]T |
| Interpro | IPR006361 | Uroporphyrinogen | | |
| | | decarboxylase | | |
| | | HemE | | |
| PANTHER | PTHR21091: | Uroporphyrinogen | | 1e−127 |
| | SF2 | decarboxylase | | [65-390]T |
| TIGRFAMs | TIGR01464 | hemE: | | 3.6e−187 |
| | | uroporphyrinogen | | [54-389]T |
| | | decarboxylase | | |

[0222] UROD polypeptides typically comprise any one or more of Motifs 13 to 15. Motifs 12 to 15 are typically found in UROD polypeptides and can help distinguish UROD polypeptides from other polypeptides.

Motif 13: VERPPVW[ML]MRQAGRY[ML][KPA][EVS]YF[QR]ED]L[RC][EK]K[YH][PD][SF]F
Motif 14: D[GA]VI[LI]FSDIL[TV][PI][LP][PQ][AG]M[GN]IPFD[IM]V[EK][GS]KGP[VI]
Motif 15: LGFVGAP[WF]TLA[TAS]Y[VIM][VI]EGG[SG][ST]K

[0223] Preferably, in addition to any one or more of Motifs 13 to 15, a UROD polypeptide comprises any one or more of Motifs 16 to 18. Motifs 16 to 18 are typically found in photosynthetic UROD (PS-UROD) polypeptides.

Motif 16: QPW[RK][AV]F[KQ]PDGVI[LM]FSDILTPLP[GA]M[GN][IV]PFD
Motif 17: RPP[VA]W[ML]MRQAGRYM[KA][VS]Y[RQ]DL[CA][EDK]K[YH]P
Motif 18: Y[IV]RYQ[IAV][DE]SGAQ[VAC][VI]QIFDSW[AG][GT][QE]L[SP]P[QV]D[FWY]EE
[FW][SA][LK]PY[LIQ][KQ]Q[IV][VI]D

[0224] Further preferably, in addition to any one or more of Motifs 13 to 15, a UROD polypeptide comprises any one or more of Motifs 16 to 18 and/or any one or more of Motifs 19 to 21. Motifs 19 to 21 are typically found in the HEM1 class of photosynthetic UROD (PS-UROD) polypeptides.

Motif 19: MCHTAP[HND]VLR[AGT]LLSHL[TA][QK]AI[SA][DE]Y[IV][IV][YF]QV[EN]SGA[HQ]
CIQIFDSWGGQLPP[HED][MV]W
Motif 20: YINGNGGLLERMK[DG]TG[VA]DVIGLDWTVDMADGRRRLG[SN][GD]I[SG][VI]Q
GNVDPA[YF]L
Motif 21: A[VL]LGFVGAPWTIATY[IV]VEGG[TM]T[RN]TYT[NT]IK

[0225] According to another embodiment, in addition to any one or more of Motifs 13 to 15, a UROD polypeptide comprises any one or more of Motifs 16 to 18 and/or any one or more of Motifs 22 to 24. Motifs 22 to 24 are typically found in the HEM2 class of photosynthetic UROD (PS-UROD) polypeptides.

Motif 22: W[LM]MRQAGRYMK[SV]YQ[DIT][LI]C[EK][KR][YH]P[ST]FRERSEN[VA]DL[VA]V
EISLQPW[KR][VA]FKPDGVI
Motif 23: YI[RQ]YQAD[NS]GAQ[AV]VQIFDSWATELSPVDFEEFSLPYLKQI[VI][DAE][AEST]
VK[KQ]THP[DN]L
Motif 24: YVG[EQ]AL[TS]ILR[KAE]EV[GND]N[EK]A[AT]VLGFVGAPFTLASY[VI]VEGGSSK
[NH][FY][TS]KIK[RK][LM]AF

[0226] According to another embodiment, in addition to any one or more of Motifs 13 to 15, a UROD polypeptide comprises any one or more of Motifs 25 to 27. Motifs 25 to 27 are typically found in the CYANO class of photosynthetic UROD (PS-UROD) polypeptides.

Motif 25: PVWMMRQAGRYMK[VI]YRDLR[DE][KN][YH]PSFRERSEN[PA]DL[AS][IY]EIS
[LM]QP[WF][RHK]AFQPDG
Motif 26: Y[VL][RS]YQI[DQ][CS]GAQV[VI]Q[ML]FDSWAGQL[ST]PQDY[DE][TVE]FA[LA]P
YQ[QK][KQ]VV[RDN][LQ]VK[EA][TK]HPDT
Motif 27: [TR]LRQEVGN[QK][AS][TA]VLGFVG[AS]PWTLAAY[AV][IV]EGKSSK[ND]YA[VI]I
KAMAFSEP[EA][IL]LH

[0227] According to another embodiment, in addition to any one or more of Motifs 13 to 15, a UROD polypeptide comprises any one or more of Motifs 28 to 30. Motifs 28 to 30 are typically found in the CYANO class of photosynthetic UROD (PS-UROD) polypeptides.

Motif 28: FR[EH]RSET[PA][ED]IAIELS[LM]Q[PC][WH]RA[FY][GKR][PM]DG[VI]IMFSDILTP
LP[AT][LM]GI[ED]FD[VIM]VKGK
Motif 29: [HS]AFL[DS][KH]L[AT]DE[AM][LI][GI]VY[VA]C[HY]QI[ED]SGAQV[VI]Q[ILV]F[DE]
SWA[HG][HQ]LSP[QA]Q[FY][LE]EF[SA][HKL]P[YA][AN][EQ]
Motif 30: QPW[RK][AV]F[KQ]PDGVI[LM]FSDILTPLP[GA]M[GN][IV]PFD

[0228] Motifs 13 to 30 were generated using MEME 4.0.0 from public website (http://meme.nbcr.net/meme4/cgi-bin/meme.cgi); The MEME algorithm was as disclosed in Bailey and Elkan, Proceedings of the Second International Conference on Intelligent Systems for Molecular Biology, pp. 28-36, AAAI Press, Menlo Park, Calif., 1994.

[0229] More preferably, the UROD polypeptide comprises in increasing order of preference any 2, 3, 4, 5, 6, 7, 8, 9, 10, 11, 12, 13, 14, 15, 16, 17 or 18 of the abovementioned Motifs.

[0230] Additionally or alternatively, the homologue of a UROD protein has in increasing order of preference at least 25%, 26%, 27%, 28%, 29%, 30%, 31%, 32%, 33%, 34%, 35%, 36%, 37%, 38%, 39%, 40%, 41%, 42%, 43%, 44%, 45%, 46%, 47%, 48%, 49%, 50%, 51%, 52%, 53%, 54%, 55%, 56%, 57%, 58%, 59%, 60%, 61%, 62%, 63%, 64%, 65%, 66%, 67%, 68%, 69%, 70%, 71%, 72%, 73%, 74%, 75%, 76%, 77%, 78%, 79%, 80%, 81%, 82%, 83%, 84%, 85%, 86%, 87%, 88%, 89%, 90%, 91%, 92%, 93%, 94%, 95%, 96%, 97%, 98%, or 99% overall sequence identity to the amino acid represented by SEQ ID NO: 368, provided that the homologous protein comprises any one or more of the conserved motifs as outlined above.

[0231] The overall sequence identity is determined using a global alignment algorithm, such as the Needleman Wunsch algorithm in the program GAP (GCG Wisconsin Package, Accelrys), preferably with default parameters and preferably with sequences of mature proteins (i.e. without taking into account secretion signals or transit peptides). Compared to overall sequence identity, the sequence identity will generally be higher when only conserved domains or motifs are considered. Preferably the motifs in a UROD polypeptide have, in increasing order of preference, at least 70%, 71%, 72%, 73%, 74%, 75%, 76%, 77%, 78%, 79%, 80%, 81%, 82%, 83%, 84%, 85%, 86%, 87%, 88%, 89%, 90%, 91%, 92%, 93%, 94%, 95%, 96%, 97%, 98%, or 99% sequence identity to any one or more of the motifs represented by SEQ ID NO: 515 to SEQ ID NO: 532 (Motifs 13 to 30).

[0232] Preferably, the polypeptide sequence which when used in the construction of a phylogenetic tree, such as the one depicted in FIG. 12 or 13, clusters with the group of UROD polypeptides comprising the amino acid sequence represented by SEQ ID NO: 368 rather than with any other group.

[0233] In another embodiment a “protein useful in the methods of the invention” is taken to mean an AS-MTT polypeptide as defined herein. In another embodiment a “nucleic acid useful in the methods of the invention” is taken to mean a nucleic acid capable of encoding such an AS-MTT polypeptide. The nucleic acid to be introduced into a plant (and therefore useful in performing the methods of the invention) is any nucleic acid encoding the type of protein which will now be described, hereafter also named “AS-MTT nucleic acid” or “AS-MTT gene”.

[0234] An “AS-MTT polypeptide” as defined herein refers to any polypeptide comprising a pfam conserved domain having accession number PF07889.

[0235] A PF07889 domain is also referred to as a DUF1664 domain in the terminology of the pfam database (Pfam version 23.0 (July 2008, 10340 families) R. D. Finn, J. Tate, J. Mistry, P. C. Coggill, J. S. Sammut, H. R. Hotz, G. Ceric, K. Forslund, S. R. Eddy, E. L. Sonnhammer and A. Bateman Nucleic Acids Research (2008) Database Issue 36:D281-D288). A person skilled in the art could readily determine whether any amino acid sequence in question falls within the definition of an “AS-MTT polypeptide” using known techniques and software to consult or search databases of conserved protein domains such as pfam. For Example Interpro database maybe searched as detailed in the Examples section herein.

[0236] PF07889 domain refers to a protein domain of approximately 100 amino acids long which occurs in proteins of plant origin.

[0237] Preferably the polypeptide useful in the methods of the invention comprises a protein domain having in increasing order of preference at least 50%, 51%, 52%, 53%, 54%, 55%, 56%, 57%, 58%, 59%, 60%, 61%, 62%, 63%, 64%, 65%, 66%, 67%, 68%, 69%, 70%, 71%, 72%, 73%, 74%, 75%, 76%, 77%, 78%, 79%, 80%, 81%, 82%, 83%, 84%, 85%, 86%, 87%, 88%, 89%, 90%, 91%, 92%, 93%, 94%, 95%, 96%, 97%, 98%, 99% or 100% sequence identity to the amino acid sequence located between amino acid coordinates 94 to 126 in SEQ ID NO: 537 or to the amino acid sequence of a PF07889 domain as present in any of the polypeptides of Table A4.

[0238] Additionally or alternatively, the “AS-MTT polypeptide” useful in the methods of the invention is located at a membrane, preferably at the endoplamic reticulum. Preferably the “AS-MTT polypeptide” comprises a transmembrane domain, most preferably the transmembrane domain any of the transmembrane domains present in any of the polypeptides of Table A4, most preferably represented by the sequence located between amino acids 1 to 23 or 1 to 25 or 95 to 115 of SEQ ID NO: 537. A person skilled in the art could readily determine whether any amino acid sequence in question falls comprises a transmembrane domain using known techniques and software such as for Example TMHMM or SignalP as described in the Examples section herein.

[0239] Additionally or alternatively, preferably an “AS-MTT polypeptide” as defined herein is one comprising any one or more of the Motifs described below:

### Motif 31:

[0240] G[WL][SK][FL]SD[LV]M[YF][VA]T[KR]R[NS][ML][AS][N D]AV[SA][S Nn/L][TS]K[QH]L[ED][Q N]VS[ESD][AS]LAA[TA]K[RK]HL[TS]QR (wherein amino acids between bracket represent alternative amino acids at that position), or a motif having in increasing order of preference at least 50%, 51%, 52%, 53%, 54%, 55%, 56%, 57%, 58%, 59%, 60%, 61%, 62%, 63%, 64%, 65%, 66%, 67%, 68%, 69%, 70%, 71%, 72%, 73%, 74%, 75%, 76%, 77%, 78%, 79%, 80%, 81%, 82%, 83%, 84%, 85%, 86%, 87%, 88%, 89%, 90%, 91%, 92%, 93%, 94%, 95%, 96%, 97%, 98%, 99% or 100% sequence identity to the sequence of Motif 31, preferably to Motif 31 as present in any of the polypeptides of Table A4 and represented by a sequence of 43 amino acid in length starting at the indicated amino acid coordinate in Table 3a;

### Motif 32:

[0241] AA[AT][VL]G[AV][VLM]GY[GC]YMWWK (wherein amino acids between bracket represent alternative amino acids at that position), or a motif having in increasing order of preference at least 50%, 51%, 52%, 53%, 54%, 55%, 56%, 57%, 58%, 59%, 60%, 61%, 62%, 63%, 64%, 65%, 66%, 67%, 68%, 69%, 70%, 71%, 72%, 73%, 74%, 75%, 76%, 77%, 78%, 79%, 80%, 81%, 82%, 83%, 84%, 85%, 86%, 87%, 88%, 89%, 90%, 91%, 92%, 93%, 94%, 95%, 96%, 97%, 98%, 99% or 100% sequence identity to the sequence of Motif 32, preferably to Motif 32 as present in any of the polypeptides of Table A4 as represented by a sequence of 15 amino acid in length starting at the indicated amino acid coordinate in Table 3a;

### Motif 33:

[0242] GAG[LY]IG[ST][IV][LV][LA][KR][NE]G[KR]L (wherein amino acids between bracket represent alternative amino acids at that position), or a motif having in increasing order of preference at least 50%, 51%, 52%, 53%, 54%, 55%, 56%, 57%, 58%, 59%, 60%, 61%, 62%, 63%, 64%, 65%, 66%, 67%, 68%, 69%, 70%, 71%, 72%, 73%, 74%, 75%, 76%, 77%, 78%, 79%, 80%, 81%, 82%, 83%, 84%, 85%, 86%, 87%, 88%, 89%, 90%, 91%, 92%, 93%, 94%, 95%, 96%, 97%, 98%, 99% or 100% sequence identity to the sequence of Motif 33, preferably to Motif 33 as present in any of the polypeptides of Table A4 as represented by a sequence of 15 amino acid in length starting at the indicated amino acid coordinate in Table 3a.

[0243] Additionally or alternatively, preferably the polypeptide useful in the methods of the invention comprises a motif having in increasing order of preference at least 50%, 51%, 52%, 53%, 54%, 55%, 56%, 57%, 58%, 59%, 60%, 61%, 62%, 63%, 64%, 65%, 66%, 67%, 68%, 69%, 70%, 71%, 72%, 73%, 74%, 75%, 76%, 77%, 78%, 79%, 80%, 81%, 82%, 83%, 84%, 85%, 86%, 87%, 88%, 89%, 90%, 91%, 92%, 93%, 94%, 95%, 96%, 97%, 98%, 99% or 100% sequence identity to any one or more of:
[0244] (i) Motif 31; and
[0245] (ii) Motif 32; and
[0246] (iii) Motif 33.

[0247] Amino acids indicated between brackets represent alternative amino acids at such amino acid position.

[0248] Motifs 31, 32 and 33 are typically found in AS-MTT polypeptides from any plant origin.

[0249] Additionally or alternatively, more preferably an “AS-MTT polypeptide” as defined herein is one comprising any one or more of the Motifs described below:

### Motif 34:

[0250] G[LI][SK]F[SA]DLMYVTKR[NS]MA[NT]AV[SA][NS][LM]TK[HN]L[ED]QV[SQ][ED][AS]L[AS]A [AT]K[KR]HLTQR (wherein amino acids between bracket represent alternative amino acids at that position), or a motif having in increasing order of preference at least 50%, 51%, 52%, 53%, 54%, 55%, 56%, 57%, 58%, 59%, 60%, 61%, 62%, 63%, 64%, 65%, 66%, 67%, 68%, 69%, 70%, 71%, 72%, 73%, 74%, 75%, 76%, 77%, 78%, 79%, 80%, 81%, 82%, 83%, 84%, 85%, 86%, 87%, 88%, 89%, 90%, 91%, 92%, 93%, 94%, 95%, 96%, 97%, 98%, 99% or 100% sequence identity to the sequence of Motif 34, preferably to Motif 34 as present in any of the polypeptides of Table A4 as represented by a sequence of 43 amino acid in length starting at the indicated amino acid coordinate in Table 3b;

### Motif 35:

[0251] [NG][GS][GS][SQ][GQ]G[NG]L[TS][SG]L[IV][VM]PAA[TA][LV]GA[LV]GYGYMWWK (wherein amino acids between bracket represent alternative amino acids at that position), or a motif having in increasing order of preference at least 50%, 51%, 52%, 53%, 54%, 55%, 56%, 57%, 58%, 59%, 60%, 61%, 62%, 63%, 64%, 65%, 66%, 67%, 68%, 69%, 70%, 71%, 72%, 73%, 74%, 75%, 76%, 77%, 78%, 79%, 80%, 81%, 82%, 83%, 84%, 85%, 86%, 87%, 88%, 89%, 90%, 91%, 92%, 93%, 94%, 95%, 96%, 97%, 98%, 99% or 100% sequence identity to the sequence of Motif 35, preferably to Motif 35 as present in any of the polypeptides of Table A4 as represented by a sequence of 29 amino acid in length starting at the indicated amino acid coordinate in Table 3b;

### Motif 36:

[0252] [MA]AMQ[AS]G[MIV]G[LFV][ST][KR][IV][LV]IL[AV]GAGYTGT[IV][LMV]LKNG (wherein amino acids between bracket represent alternative amino acids at that position), or a motif having in increasing order of preference at least 50%, 51%, 52%, 53%, 54%, 55%, 56%, 57%, 58%, 59%, 60%, 61%, 62%, 63%, 64%, 65%, 66%, 67%, 68%, 69%, 70%, 71%, 72%, 73%, 74%, 75%, 76%, 77%, 78%, 79%, 80%, 81%, 82%, 83%, 84%, 85%, 86%, 87%, 88%, 89%, 90%, 91%, 92%, 93%, 94%, 95%, 96%, 97%, 98%, 99%, or 100% sequence identity to the sequence of Motif 36, preferably to Motif 36 as present in any of the polypeptides of Table A4 as represented by a sequence of 29 amino acid in length starting at the indicated amino acid coordinate in Table 3b.

[0253] Additionally or alternatively, more preferably the polypeptide useful in the methods of the invention comprises a motif having in increasing order of preference at least 50%, 51%, 52%, 53%, 54%, 55%, 56%, 57%, 58%, 59%, 60%, 61%, 62%, 63%, 64%, 65%, 66%, 67%, 68%, 69%, 70%, 71%, 72%, 73%, 74%, 75%, 76%, 77%, 78%, 79%, 80%, 81%, 82%, 83%, 84%, 85%, 86%, 87%, 88%, 89%, 90%, 91%, 92%, 93%, 94%, 95%, 96%, 97%, 98%, 99% or 100% sequence identity to any one or more of:
[0254] (iv) Motif 34; and
[0255] (v) Motif 35; and
[0256] (vi) Motif 36.

[0257] Motifs 34, 35 and 36 are typically found in any AS-MTT polypeptide from clades A and B. Such clades referring to the phylogenetic tree of FIG. 16 as described in the Examples section herein.

[0258] Additionally or alternatively, even more preferably an “AS-MTT polypeptide” as defined herein is one comprising any one or more of the Motifs described below:

### Motif 37:

[0259] LI[VM]PAATLGA[LV]GYGYMWWKGL[KS]FSDLMYVTKR[NS]MA[TS]AV[SAE]NLTK[HN]L[ED][QS]VSE (wherein amino acids between bracket represent alternative amino acids at that position), or a motif having in increasing order of preference at least 50%, 51%, 52%, 53%, 54%, 55%, 56%, 57%, 58%, 59%, 60%, 61%, 62%, 63%, 64%, 65%, 66%, 67%, 68%, 69%, 70%, 71%, 72%, 73%, 74%, 75%, 76%, 77%, 78%, 79%, 80%, 81%, 82%, 83%, 84%, 85%, 86%, 87%, 88%, 89%, 90%, 91%, 92%, 93%, 94%, 95%, 96%, 97%, 98%, 99% or 100% sequence identity to the sequence of Motif 37, preferably to Motif 37 as present in any of the polypeptides of Table A4 as represented by a sequence of 50 amino acid in length starting at the indicated amino acid coordinate in Table 3c;

### Motif 38:

[0260] MAMQ[AS]G[IV][GS][LVF]S[KR]ILILAGAGYT[GS]TI[LM]LKNGKLS[DE][LI][LI]GELQSL[VL][KN]G[ML][EG][KE]SG[ED] (wherein amino acids between bracket represent alternative amino acids at that position), or a motif having in increasing order of preference at least 50%, 51%, 52%, 53%, 54%, 55%, 56%, 57%, 58%, 59%, 60%, 61%, 62%, 63%, 64%, 65%, 66%, 67%, 68%, 69%, 70%, 71%, 72%, 73%, 74%, 75%, 76%, 77%, 78%, 79%, 80%, 81%, 82%, 83%, 84%, 85%, 86%, 87%, 88%, 89%, 90%, 91%, 92%, 93%, 94%, 95%, 96%, 97%, 98%, 99% or 100% sequence identity to the sequence of Motif 38, preferably to Motif 38 as present in any of the polypeptides of Table A4 as represented by a sequence of 50 amino acid in length starting at the indicated amino acid coordinate in Table 3c;

### Motif 39:

[0261] A[LI][AS][AT]AK[KT]HLTQRIQ[NH][LV]DDK[MV]E[KES]Q[KN][ED][IL]SK[SA]I[QK][NE][DN]VNA[AV][QS]E[ND]L (wherein amino acids between bracket represent alternative amino acids at that position), or a motif having in increasing order of preference at least 50%, 51%, 52%, 53%, 54%, 55%, 56%, 57%, 58%, 59%, 60%, 61%, 62%, 63%, 64%, 65%, 66%, 67%, 68%, 69%, 70%, 71%, 72%, 73%, 74%, 75%, 76%, 77%, 78%, 79%, 80%, 81%, 82%, 83%, 84%, 85%, 86%, 87%, 88%, 89%, 90%, 91%, 92%, 93%, 94%, 95%, 96%, 97%, 98%, 99% or 100% sequence identity to the sequence of Motif 39, preferably to Motif 39 as present in any of the polypeptides of Table A4 as represented by a sequence of 41 amino acid in length starting at the indicated amino acid coordinate in Table 3c.

[0262] Additionally or alternatively, even more preferably the polypeptide useful in the methods of the invention comprises a motif having in increasing order of preference at least 50%, 51%, 52%, 53%, 54%, 55%, 56%, 57%, 58%, 59%, 60%, 61%, 62%, 63%, 64%, 65%, 66%, 67%, 68%, 69%, 70%, 71%, 72%, 73%, 74%, 75%, 76%, 77%, 78%, 79%, 80%, 81%, 82%, 83%, 84%, 85%, 86%, 87%, 88%, 89%, 90%, 91%, 92%, 93%, 94%, 95%, 96%, 97%, 98%, 99% or 100% sequence identity to any one or more of:
[0263] (vii) Motif 37; and
[0264] (viii) Motif 38; and
[0265] (ix) Motif 39.

[0266] Motifs 37, 38 and 39 are typically found in any AS-MTT polypeptides from Glade A. This Glade A is shown in the phylogenetic tree of FIG. 16 as defined in the Examples section herein.

[0267] Most preferably an “AS-MTT polypeptide” as defined herein is one comprising any one or more of the Motifs as described in Tables 3a, 3b, 3c.

TABLES 3a
Motifs 31, Motif 32, and Motif 33 as present in the polypeptides of Table A4.

| | ALL AS-MTT | | |
|---|---|---|---|
| | Motif 31 | Motif 32 | Motif 33 |
| | Length (in amino acid) | | |
| | 43 | 15 | 15 |
| | Amino | Amino | Amino |
| | acid coordinate | acid coordinate | acid coordinate |
| Name | Start | Start | Start |
| P. trichocarpa_657115#1_A | 114 | 99 | 16 |
| P. trichocarpa_657115#1.2_A | 111 | 98 | 16 |
| P. persica_TC1247#1_A | 111 | 98 | 16 |
| C. sinensis_TC3201#1_A | 115 | 100 | 16 |
| M. domestica_TC12261#1_A | 115 | 99 | 16 |
| A. thaliana_AT2G02730.1#1_A | 120 | 99 | 16 |
| G. hirsutum_TC83567#1_A | 118 | 99 | 18 |
| B. napus_TC66611#1_A | 114 | 99 | 18 |
| A. thaliana_AT1G27000.1#1_A | 113 | 94 | 16 |
| M. domestica_TC9509#1_A | 116 | 97 | 16 |
| M. truncatula_AC136286_4.4#1_A | 113 | 97 | 16 |
| P. trichocarpa_566293#1_A | 113 | 102 | 16 |
| S. officinarum_TC86637#1_B | 116 | 103 | 16 |
| P. americana_TA1256_3435#1_B | 116 | 103 | 16 |
| C. maculosa_TA1398_215693#1_B | 117 | 98 | 16 |
| O. sativa_LOC_Os01g08990.1#1_B | 114 | 96 | 16 |
| O. sativa_LOC_Os05g08980.1#1_B | 114 | 101 | 16 |
| T. officinale_TA751_50225#1_B | 113 | 101 | 16 |
| F. arundinacea_TC6829#1_B | 113 | 95 | 16 |
| S. bicolor_Sb03g003440.1#1_B | 114 | 94 | 16 |
| I. nil_TC6724#1_B | 110 | 94 | 16 |
| S. tuberosum_TC170010#1_B | 116 | 101 | 16 |
| Aquilegia_sp_TC25212#1_B | 114 | 101 | 17 |
| V. vinifera_GSVIVT00029000001#1_B | 112 | 101 | 17 |
| H. annuus_TC32349#1_B | 114 | 99 | 16 |
| A. comosus_DT336453#1_bZIP17-like | 112 | 97 | 17 |
| Triphysaria_sp_TC1899#1_bZIP17-like | 116 | 99 | 12 |
| M. truncatula_CU024880_148.4#1_bZIP17-like | 112 | 98 | 12 |
| L. sativa_TC16705#1_bZIP17-like | 109 | 99 | 16 |
| P. taeda_TA8248_3352#1_bZIP17-like | 111 | 98 | 16 |
| H. paradoxus_TA2663_73304#1_bZIP17-like | 114 | 100 | 16 |
| E. esula_TC4805#1bZIP17-like | 115 | 100 | 12 |
| I. nil_TC113#1_bZIP17-like | 110 | 98 | 16 |
| A. thaliana_AT1G04960.1#1_bZIP17-like | 109 | 96 | 12 |
| O. sativa_LOC_Os09g30478.1#1_bZIP17-like | 114 | 99 | 12 |
| Aquilegia_sp_TC26001#1_bZIP17-like | 112 | 96 | 12 |
| H. vulgare_TC157185#1_bZIP17-like | 111 | 104 | 12 |
| P. trichocarpa_645036#1_bZIP17-like | 112 | 97 | 16 |
| T. aestivum_TC297361#1_bZIP17-like | 114 | 96 | 16 |
| S. tuberosum_TC182348#1_bZIP17-like | 109 | 97 | 18 |
| E. esula_TC6178#1_Unk | 114 | 97 | 9 |
| L. sativa_TC18726#1_Unk | 112 | 100 | 16 |
| P. patens_136490#1_Unk | 113 | 97 | 16 |
| V. vinifera_GSVIVT00002774001#1_Unk | 112 | 99 | 12 |
| C. solstitialis_TA4216_347529#1_Unk | 112 | 97 | 16 |
| S. moellendorffii_271950#1_Unk | 119 | 97 | 12 |
| A. thaliana_AT1G24267.1#1_Unk | 106 | 98 | 17 |
| G. hirsutum_TC128629#1_Unk | 112 | 91 | 17 |
| A. thaliana_AT1G24265.2#1_Unk | 115 | 95 | 12 |
| G. max_Glyma08g29150.1#1_Unk | 113 | 96 | 12 |
| S. bicolor_Sb03g009200.1#1_Unk | 111 | 96 | 16 |
| O. sativa_LOC_Os01g02180.1#1_Unk | 109 | 99 | 10 |
| Aquilegia_sp_TC28043#1_Unk | 111 | 97 | 12 |
| S. tuberosum_TC184255#1_Unk | 112 | 94 | 18 |
| P. trichocarpa_554754#1_Unk | 112 | 97 | 10 |
| Triphysaria_sp_TC917#1_Unk | 113 | 98 | 65 |

TABLE 3b
Motifs 34, Motif 35, and Motif 36 as present the polypeptides
of Clades A and B of the phylogenetic tree of FIG. 16.

| | Clades A and B | | |
|---|---|---|---|
| | Motif 34 | Motif 35 | Motif 36 |
| | Length in amino acids | | |
| | 43 | 29 | 29 |
| | Amino acid | Amino acid | Amino acid |
| Name | coordinate Start | coordinate End | coordinate End |
| I. nil_TC6724#1_B | 111 | 83 | 1 |
| C. maculosa_TA1398_215693#1_B | 113 | 83 | 1 |
| S. tuberosum_TC170010#1_B | 111 | 87 | 1 |
| O. sativa_LOC_Os05g08980.1#1_B | 118 | 87 | 1 |
| S. officinarum_TC86637#1_B | 120 | 87 | 1 |
| H. annuus_TC32349#1_B | 113 | 87 | 1 |
| P. trichocarpa_566293#1_A | 116 | 84 | 1 |
| P. trichocarpa_657115#1_A | 116 | 82 | 1 |
| P. americana_TA1256_3435#1_B | 116 | 81 | 1 |
| A. thaliana_AT1G27000.1#1_A | 114 | 82 | 1 |
| T. officinale_TA751_50225#1_B | 113 | 80 | 1 |
| Aquilegia_sp_TC25212#1_B | 110 | 80 | 1 |
| F. arundinacea_TC6829#1B | 117 | 85 | 1 |
| P. trichocarpa_657115#1.2_A | 116 | 83 | 1 |
| G. hirsutum_TC83567#1_A | 110 | 84 | 1 |
| B. napus_TC66611#1_A | 112 | 84 | 1 |
| P. persica_TC1247#1_A | 109 | 88 | 1 |
| V. vinifera_GSVIVT00029000001#1_B | 116 | 89 | 1 |
| M. domestica_TC12261#1_A | 112 | 89 | 1 |
| A. thaliana_AT2G02730.1#1_A | 111 | 82 | 2 |
| O. sativa_LOC_Os01g08990.1#1_B | 111 | 90 | 1 |
| C. sinensis_TC3201#1_A | 109 | 87 | 1 |
| S. bicolor_Sb03g003440.1#1_B | 114 | 85 | 1 |
| M. domestica_TC9509#1A | 112 | 81 | 1 |
| M. truncatula_AC136286_4.4#1_A | 119 | 82 | 1 |

TABLE 3c
Motifs 37, Motif 38, and Motif 39 as present the polypeptides
of Clades A of the phylogenetic tree of FIG. 16.

| | Clade A | | |
|---|---|---|---|
| | Motif 37 | Motif 38 | Motif 39 |
| | Length in amino acids | | |
| | 50 | 50 | 41 |
| | Amino | Amino | Amino |
| | acid | acid | acid |
| | coordinate | coordinate | coordinate |
| Name | Start | End | End |
| P. trichocarpa_566293#1_A | 97 | 1 | 147 |
| P. trichocarpa_657115#1_A | 97 | 1 | 147 |
| P. trichocarpa_657115#1.2_A | 97 | 1 | 147 |
| P. persica_TC1247#1_A | 90 | 1 | 141 |
| M. domestica_TC12261#1_A | 93 | 1 | 143 |
| G. hirsutum_TC83567#1_A | 91 | 1 | 140 |
| A. thaliana_AT2G02730.1#1_A | 92 | 1 | 143 |
| A. thaliana_AT1G27000.1#1_A | 95 | 1 | 145 |
| M. domestica_TC9509#1_A | 93 | 1 | 140 |
| B. napus_TC66611#1_A | 93 | 1 | 143 |
| C. sinensis_TC3201#1_A | 90 | 1 | 150 |
| M. truncatula_AC136286_4.4#1_A | 100 | 2 | 142 |

[0268] More preferably, the AS-MTT polypeptide comprises in increasing order of preference, at least 2, at least 3, at least 4, at least 5, at least 6, at least 7, at least 8, or all 12.

[0269] Alternatively, preferably, the AS-MTT polypeptide refers to a homologue of any of the polypeptides of Table A4.

[0270] Additionally or alternatively, the homologue of an AS-MTT protein has in increasing order of preference at least 25%, 26%, 27%, 28%, 29%, 30%, 31%, 32%, 33%, 34%, 35%, 36%, 37%, 38%, 39%, 40%, 41%, 42%, 43%, 44%, 45%, 46%, 47%, 48%, 49%, 50%, 51%, 52%, 53%, 54%, 55%, 56%, 57%, 58%, 59%, 60%, 61%, 62%, 63%, 64%, 65%, 66%, 67%, 68%, 69%, 70%, 71%, 72%, 73%, 74%, 75%, 76%, 77%, 78%, 79%, 80%, 81%, 82%, 83%, 84%, 85%, 86%, 87%, 88%, 89%, 90%, 91%, 92%, 93%, 94%, 95%, 96%, 97%, 98%, 99% or 100% overall sequence identity to the amino acid represented by any of the polypeptides of Table A4 and most preferably to SEQ ID NO: 537. The overall sequence identity is determined using a global alignment algorithm, such as the Needleman Wunsch algorithm in the program GAP (GCG Wisconsin Package, Accelrys), preferably with default parameters and preferably with sequences of mature proteins (i.e. without taking into account secretion signals or transit peptides). Compared to overall sequence identity, the sequence identity will generally be higher when only conserved domains or motifs are considered. Preferably the homologue of an AS-MTT polypeptide has, in increasing order of preference, at least 70%, 71%, 72%, 73%, 74%, 75%, 76%, 77%, 78%, 79%, 80%, 81%, 82%, 83%, 84%, 85%, 86%, 87%, 88%, 89%, 90%, 91%, 92%, 93%, 94%, 95%, 96%, 97%, 98%, or 99% sequence identity to any of the motifs represented by Motifs 37, Motif 38 and Motif 39.

[0271] Preferably, the AS-MTT polypeptide sequence when used in the construction of a phylogenetic tree such as the one depicted in FIG. 16, clusters within Clade A, preferably with the polypeptide represented by SEQ ID NO: 537.

[0272] In another embodiment a “protein useful in the methods of the invention” is taken to mean an EXO-1 polypeptide as defined herein. In another embodiment a “nucleic acid useful in the methods of the invention” is taken to mean a nucleic acid capable of encoding such an EXO-1 polypeptide. The nucleic acid to be introduced into a plant (and therefore useful in performing the methods of the invention) is any nucleic acid encoding the type of protein which will now be described, hereinafter also named “EXO-1 nucleic acid” or “EXO-1 gene”.

[0273] An “EXO-1 polypeptide” as defined herein refers to any polypeptide comprising at least a XPG_N domain in the N-terminal region of the polypeptide with a PFAM accession number PF 00752 followed by a XPG_{—}1 domain having a PFAM accession number PF 00867 and included in the EXONUCLEASE 1 domain (PTHR 11081:SF8 or PTHR 11081:SF9).

[0274] EXO-1 polypeptides typically belong to the nucleases family and proteins comprising EXO-1 polypeptide are involved in DNA repair process, more specifically having a 5′-nuclease activity (EC 3.1.11.1).

[0275] Preferably, the XPG_N domain of an EXO-1 polypeptide has, in increasing order of preference at least, 49%, 50%, 51%, 52%, 53%, 54%, 55%, 56%, 57%, 58%, 59%, 60%, 61%, 62%, 63%, 64%, 65%, 66%, 67%, 68%, 69%, 70%, 71%, 72%, 73%, 74%, 75%, 76%, 77%, 78%, 79%, 80%, 81%, 82%, 83%, 84%, 85%, 86%, 87%, 88%, 89%, 90%, 91%, 92%, 93%, 94%, 95%, 96%, 97%, 98%, or 99% or more sequence identity to the sequence located between amino acid 1 and 99 of SEQ ID NO: 763.

[0276] Preferably, the XPG_I domain of an EXO-1 polypeptide has, in increasing order of preference at least, 49%, 50%, 51%, 52%, 53%, 54%, 55%, 56%, 57%, 58%, 59%, 60%, 61%, 62%, 63%, 64%, 65%, 66%, 67%, 68%, 69%, 70%, 71%, 72%, 73%, 74%, 75%, 76%, 77%, 78%, 79%, 80%, 81%, 82%, 83%, 84%, 85%, 86%, 87%, 88%, 89%, 90%, 91%, 92%, 93%, 94%, 95%, 96%, 97%, 98%, or 99% or more sequence identity to the sequence located between amino acid 138 and 230 of SEQ ID NO: 763.

[0277] Preferably, the EXONUCLEASE 1 domain of an EXO-1 polypeptide has, in increasing order of preference at least, 49%, 50%, 51%, 52%, 53%, 54%, 55%, 56%, 57%, 58%, 59%, 60%, 61%, 62%, 63%, 64%, 65%, 66%, 67%, 68%, 69%, 70%, 71%, 72%, 73%, 74%, 75%, 76%, 77%, 78%, 79%, 80%, 81%, 82%, 83%, 84%, 85%, 86%, 87%, 88%, 89%, 90%, 91%, 92%, 93%, 94%, 95%, 96%, 97%, 98%, or 99% or more sequence identity to the sequence located between amino acid 17 and 333 of SEQ ID NO: 763.

[0278] Additionally or alternatively, the EXO-1 polypeptide useful in the methods of the invention comprises one or more sequence motifs having at least, in increasing order of preference 49%, 50%, 51%, 52%, 53%, 54%, 55%, 56%, 57%, 58%, 59%, 60%, 61%, 62%, 63%, 64%, 65%, 66%, 67%, 68%, 69%, 70%, 71%, 72%, 73%, 74%, 75%, 76%, 77%, 78%, 79%, 80%, 81%, 82%, 83%, 84%, 85%, 86%, 87%, 88%, 89%, 90%, 91%, 92%, 93%, 94%, 95%, 96%, 97%, 98%, or 99% or more sequence identity to any one or more of motifs 40 to 42:

Motif 40: G[QKC][RT]VA[VI]D[TA]YSWLH[KR][GA]A[YL]SC[SA]RELC[KEL]GLPT
Motif 41: Y[CF]M[HK]RVN[LM]L[RL]H[YH][GK][VI]KP[IV][LV]VFDGGRLPMK[AS][DE][QTE]
ENKR[AR]R[SK]RKENL[EA]RA[KR]E[HL][ELW]
Motif 42: V[DQA]A[VI]ITEDSDL[IL][AP][FY]GC[PK]R[IV][IF]FK[ML]D[KR][FYN]GQG

[0279] The above mentioned motifs were outlined using MEME algorithm (Bailey and Elkan, Proceedings of the Second International Conference on Intelligent Systems for Molecular Biology, pp. 28-36, AAAI Press, Menlo Park, Calif., 1994.)

[0280] Additionally or alternatively, the homologue of an EXO-1 protein has in increasing order of preference at least 25%, 26%, 27%, 28%, 29%, 30%, 31%, 32%, 33%, 34%, 35%, 36%, 37%, 38%, 39%, 40%, 41%, 42%, 43%, 44%, 45%, 46%, 47%, 48%, 49%, 50%, 51%, 52%, 53%, 54%, 55%, 56%, 57%, 58%, 59%, 60%, 61%, 62%, 63%, 64%, 65%, 66%, 67%, 68%, 69%, 70%, 71%, 72%, 73%, 74%, 75%, 76%, 77%, 78%, 79%, 80%, 81%, 82%, 83%, 84%, 85%, 86%, 87%, 88%, 89%, 90%, 91%, 92%, 93%, 94%, 95%, 96%, 97%, 98%, or 99% overall sequence identity to the amino acid represented by SEQ ID NO: 763, provided that the homologous protein comprises any one or more of the conserved motifs as outlined above. The overall sequence identity is determined using a global alignment algorithm, such as the Needleman Wunsch algorithm in the program GAP (GCG Wisconsin Package, Accelrys), preferably with default parameters and preferably with sequences of mature proteins (i.e. without taking into account secretion signals or transit peptides). Compared to overall sequence identity, the sequence identity will generally be higher when only conserved domains or motifs are considered. Preferably the motifs in an EXO-1 polypeptide have, in increasing order of preference, at least 70%, 71%, 72%, 73%, 74%, 75%, 76%, 77%, 78%, 79%, 80%, 81%, 82%, 83%, 84%, 85%, 86%, 87%, 88%, 89%, 90%, 91%, 92%, 93%, 94%, 95%, 96%, 97%, 98%, or 99% sequence identity to any one or more of the motifs represented by SEQ ID NO: 828 to SEQ ID NO: 830 (Motifs 40 to 42).

[0281] Preferably, the polypeptide sequence which when used in the construction of a phylogenetic tree, such as the one depicted in FIG. 19, clusters with the group of EXO-1 polypeptides comprising the amino acid sequence represented by SEQ ID NO: 763 rather than with any other group.

[0282] In another embodiment a “protein useful in the methods of the invention” is taken to mean a YiAP2 polypeptide as defined herein. In another embodiment a “nucleic acid useful in the methods of the invention” is taken to mean a nucleic acid capable of encoding such a YiAP2 polypeptide. The nucleic acid to be introduced into a plant (and therefore useful in performing the methods of the invention) is any nucleic acid encoding the type of protein which will now be described, hereafter also named “YiAP2 nucleic acid” or “YiAP2 gene”.

[0283] A “YiAP2 polypeptide” as defined herein refers to any polypeptide comprising at least two AP2 domains (Pfam accession number PF00847; InterPro accession IPRO01471) and anyone or more of the following motifs:

[0284] Motif 43 as represented by a motif having in increasing order of preference at least 50%, 51%, 52%, 53%, 54%, 55%, 56%, 57%, 58%, 59%, 60%, 61%, 62%, 63%, 64%, 65%, 66%, 67%, 68%, 69%, 70%, 71%, 72%, 73%, 74%, 75%, 76%, 77%, 78%, 79%, 80%, 81%, 82%, 83%, 84%, 85%, 86%, 87%, 88%, 89%, 90%, 91%, 92%, 93%, 94%, 95%, 96%, 97%, 98%, 99% or 100% sequence identity to EYIGSLR[R/G]KSSGFSRGVSKYRGVARHHHDGR WEARIGKVFGNKYLYLGT[Y/F] (SEQ ID NO: 890) or to any of the homologous region of Motif 43 as present in any of the polypeptides of Table A6, wherein amino acids between bracket represent alternative amino acids at that position;

[0285] Motif 44 as represented by a motif having in increasing order of preference at least 50%, 51%, 52%, 53%, 54%, 55%, 56%, 57%, 58%, 59%, 60%, 61%, 62%, 63%, 64%, 65%, 66%, 67%, 68%, 69%, 70%, 71%, 72%, 73%, 74%, 75%, 76%, 77%, 78%, 79%, 80%, 81%, 82%, 83%, 84%, 85%, 86%, 87%, 88%, 89%, 90%, 91%, 92%, 93%, 94%, 95%, 96%, 97%, 98%, 99% or 100% sequence identity to RKSVPRDSPPQRSSIYRGVTRHRWTGRYEAHL WDKNCWNESQNKKGRQVY (SEQ ID NO: 891) or to any of the homologous region of Motif 44 as present in any of the polypeptides of Table A6.

[0286] Motif 45 as represented by a motif having in increasing order of preference at least 50%, 51%, 52%, 53%, 54%, 55%, 56%, 57%, 58%, 59%, 60%, 61%, 62%, 63%, 64%, 65%, 66%, 67%, 68%, 69%, 70%, 71%, 72%, 73%, 74%, 75%, 76%, 77%, 78%, 79%, 80%, 81%, 82%, 83%, 84%, 85%, 86%, 87%, 88%, 89%, 90%, 91%, 92%, 93%, 94%, 95%, 96%, 97%, 98%, 99% or 100% sequence identity to YD[DN]EEAAA[RH]AYDLAALKYWG[QH]DTILNFPLS [NT]YEEEL[KV]EMEG (SEQ ID NO: 892) or to any of the homologous region of Motif 45 as present in any of the polypeptides of Table A6, wherein amino acids between bracket represent alternative amino acids at that position;

[0287] Motif 46 as represented by a motif having in increasing order of preference at least 50%, 51%, 52%, 53%, 54%, 55%, 56%, 57%, 58%, 59%, 60%, 61%, 62%, 63%, 64%, 65%, 66%, 67%, 68%, 69%, 70%, 71%, 72%, 73%, 74%, 75%, 76%, 77%, 78%, 79%, 80%, 81%, 82%, 83%, 84%, 85%, 86%, 87%, 88%, 89%, 90%, 91%, 92%, 93%, 94%, 95%, 96%, 97%, 98%, 99% or 100% sequence identity to ATQEEAA[TQ]AYD[MR]AAIEYRGLNAVTNFDLS [RK]YIKWLRPNNNQ (SEQ ID NO: 893) or to any of the homologous region of Motif 46 as present in any of the polypeptides of Table A6, wherein amino acids between bracket represent alternative amino acids at that position;

[0288] Motif 47 as represented by a motif having in increasing order of preference at least 50%, 51%, 52%, 53%, 54%, 55%, 56%, 57%, 58%, 59%, 60%, 61%, 62%, 63%, 64%, 65%, 66%, 67%, 68%, 69%, 70%, 71%, 72%, 73%, 74%, 75%, 76%, 77%, 78%, 79%, 80%, 81%, 82%, 83%, 84%, 85%, 86%, 87%, 88%, 89%, 90%, 91%, 92%, 93%, 94%, 95%, 96%, 97%, 98%, 99% or 100% sequence identity to [QE]SQ[KP][PN][RTQ][CTR][ST][FN]P[DNE][DN][IN][QN]T[YV][FT][ET][CK][TQ][DK] (SEQ ID NO: 894) or to any of the homologous region of Motif 47 as present in any of the polypeptides of Table A6, wherein amino acids between bracket represent alternative amino acids at that position;

[0289] Motif 48 as represented by a motif having in increasing order of preference at least 50%, 51%, 52%, 53%, 54%, 55%, 56%, 57%, 58%, 59%, 60%, 61%, 62%, 63%, 64%, 65%, 66%, 67%, 68%, 69%, 70%, 71%, 72%, 73%, 74%, 75%, 76%, 77%, 78%, 79%, 80%, 81%, 82%, 83%, 84%, 85%, 86%, 87%, 88%, 89%, 90%, 91%, 92%, 93%, 94%, 95%, 96%, 97%, 98%, 99% or 100% sequence identity to QS[SP]KFKE[MT][LV]E (SEQ ID NO: 895) or to any of the homologous region of Motif 48 as present in any of the polypeptides of Table A6, wherein amino acids between bracket represent alternative amino acids at that position.

[0290] Table 4a localises the homologous region of Motifs 43 to 48 in the polypeptides of Table A6. The length of the each motif as well as the amino acid coordinate labelling the start of motif is given.

[0291] Preferably A “YiAP2 polypeptide” comprises at least two AP2 domains (Pfam accession number PF00847; InterPro accession IPR001471) and in increasing order of preference at least 1,2,3,4,5, or all 6 motifs, more preferably motifs 43, 44 and 46.

TABLE 4a
Motifs 43 to 48 as present in the polypeptides of table A6.

| | YiAP2 | | | | | |
|---|---|---|---|---|---|---|
| | Motif Name | | | | | |
| | Motif 43 | Motif 44 | Motif 45 | Motif 46 | Motif 47 | Motif 48 |
| | Motif Length (in amino acid) | | | | | |
| | 50 | 50 | 41 | 41 | 21 | 10 |
| | Amino acid | Amino acid | Amino acid | Amino acid | Amino acid | Amino acid |
| | coordinate | coordinate | coordinate | coordinate | coordinate | coordinate |
| Name polypeptide | Start | Start | Start | Start | Start | Start |
| S. tuberosum_TC187592#1 | 142 | 44 | 97 | 192 | 369 | 314 |
| A. thaliana_AT1G16060.1#1 | 142 | 44 | 97 | 192 | 350 | 303 |
| O. sativa_LOC_Os08g34360. | 139 | 41 | 94 | 189 | 344 | 295 |
| Z. mays_TC386652#1 | 137 | 39 | 92 | 187 | 325 | 292 |
| G. hirsutum_TC125414#1 | 134 | 36 | 89 | 184 | 313 | 290 |
| R. communis_TA2948_3988#1 | 133 | 36 | 88 | 183 | 310 | 287 |
| R. communis_EG658396#1 | 133 | 36 | 88 | 183 | 310 | 287 |
| S. bicolor_Sb02g025080.1# | 132 | 36 | 87 | 182 | 308 | 287 |
| O. sativa_LOC_Os09g25600. | 131 | 35 | 86 | 181 | 303 | 283 |
| M. truncatula_AC126784_13 | 131 | 35 | 86 | 181 | 301 | 281 |
| G. max_Glyma17g07860.1#1 | 131 | 34 | 86 | 181 | 299 | 279 |
| Medtr_AP2 | 131 | 33 | 86 | 181 | 299 | 278 |
| V. vinifera_GSVIVT0001713 | 129 | 31 | 84 | 179 | 294 | 277 |
| C. sinensis_TC9216#1 | 128 | 30 | 83 | 178 | 275 | 277 |
| C. clementina_TC2567#1 | 128 | 30 | 83 | 178 | 238 | 277 |
| C. clementina_TC1922#1 | 128 | 30 | 83 | 178 | 226 | 277 |
| C. clementina_DY301305#1 | 128 | 30 | 83 | 178 | 10 | 275 |
| C. clementina_DY290073#1 | 128 | 30 | 83 | 178 | 7 | 265 |
| C. clementina_DY288437#1 | 128 | 30 | 83 | 178 | 7 | 232 |
| Aquilegia_sp_TC20979#1 | 128 | 30 | 83 | 178 | 7 | 228 |
| C. sinensis_EY655317#1 | 128 | 30 | 83 | 178 | 7 | 228 |
| C. sinensis_EY726128#1 | 128 | 30 | 83 | 178 | 7 | 6 |
| Triphysaria_sp_TC12598#1 | 128 | 30 | 83 | 178 | 7 | 6 |
| O. basilicum_TA1087_39350 | 126 | 28 | 81 | 176 | 7 | 6 |
| P. trichocarpa_800184#1 | 122 | 27 | 77 | 172 | 7 | 6 |
| G. max_Glyma07g02380.1#1 | 112 | 17 | 67 | 162 | 4 | 6 |

[0292] A PF00847 domain is also referred to as AP2 domain in the terminology of the pfam database (Pfam version 23.0 (July 2008, 10340 families) R. D. Finn, J. Tate, J. Mistry, P. C. Coggill, J. S. Sammut, H. R. Hotz, G. Ceric, K. Forslund, S. R. Eddy, E. L. Sonnhammer and A. Bateman Nucleic Acids Research (2008) Database Issue 36:D281-D288). A person skilled in the art could readily determine whether any amino acid sequence in question falls within the definition of a “YiAP2polypeptide” using known techniques and software to consult or search databases of conserved protein domains such as pfam. For Example Interpro database maybe searched as detailed in the Examples section herein.

[0293] PF00847 domain refers to a protein domain of approximately 60 amino acids long which typically occurs in proteins of plant origin.

[0294] Preferably an AP2 domain in a polypeptide useful in the methods of the invention comprises a protein domain having in increasing order of preference at least 70%, 71%, 72%, 73%, 74%, 75%, 76%, 77%, 78%, 79%, 80%, 81%, 82%, 83%, 84%, 85%, 86%, 87%, 88%, 89%, 90%, 91%, 92%, 93%, 94%, 95%, 96%, 97%, 98%, 99% or 100% sequence identity to any one or more of the following:
[0295] (i) the amino acid sequence located between amino acid coordinates 49 to 106 of SEQ ID NO: 836, which represent the N-terminal AP2 domain in SEQ ID NO: 836;
[0296] (ii) the sequence located between amino acid coordinates 148 to 200 of SEQ ID NO: 836, which represent the C-terminal AP2 domain in SEQ ID NO: 836;
[0297] (iii) the amino acid sequence of an AP2 domain as present in any of the polypeptides of Table A6.

[0298] Conserved motifs in YiAP2 polypeptides, such as Motifs 43 to 48 may be defined by using the algorithm MEME; Bailey and Elkan, Proceedings of the Second International Conference on Intelligent Systems for Molecular Biology, pp. 28-36, AAAI Press, Menlo Park, Calif., 1994, Bailey et al., Nucleic Acids Research, 34, W369-W373, 2006), with the set of sequences of Table A6.

[0299] Additionally or alternatively, the “YiAP2 polypeptide” useful in the methods of the invention, and when expressed in plants, is located in the nucleus. Preferably the “YiAP2 polypeptide” comprises a nuclear localisation signal. A person skilled in the art can readily determine whether an amino acid sequence in question comprises a comprises a nuclear localisation signal using known techniques and software such as for example SignalP as described in the Examples section herein.

[0300] Alternatively and preferably, the YiAP2 polypeptide refers to a homologue of any of the polypeptides of Table A6.

[0301] Preferably the homologue of an YiAP2 polypeptide comprises two or more AP2 domains having in increasing order of preference, at least 70%, 71%, 72%, 73%, 74%, 75%, 76%, 77%, 78%, 79%, 80%, 81%, 82%, 83%, 84%, 85%, 86%, 87%, 88%, 89%, 90%, 91%, 92%, 93%, 94%, 95%, 96%, 97%, 98%, 99% or 100% sequence identity to any one or more of the following:
[0302] (i) the amino acid sequence located between amino acid coordinates 49 to 106 of SEQ ID NO: 836, which represent the N-terminal AP2 domain in SEQ ID NO: 836;
[0303] (ii) the sequence located between amino acid coordinates 148 to 200 of SEQ ID NO: 836, which represent the C-terminal AP2 domain in SEQ ID NO: 836;
[0304] (iii) the amino acid sequence of an AP2 domain as present in any of the polypeptides of Table A6.

[0305] The AP2 domain is well known to a person skill in the art, and described extensively in databases such as pfam, interpro and smart (Bateman et al., Nucleic Acids Research 30(1): 276-280 (2002); Mulder et al., (2003) Nucl. Acids. Res. 31, 315-318; Letunic et al. (2006) Nucleic Acids Res 34, D257-D260). The sequence “xazGVpxzxhGxzWxucltcsxxxxxxxxxxttc laLGoFsotytAAhAYDxAAhhhhGxxpAhhNFsxxxxtt” (SEQ ID NO: 897) represents a consensus sequence of an AP2 domain as provided in the SMART database. The accession number for the AP2 domain in the SMART database is SM00380. The non-capital small letters represent a code for groupings of amino acids. Amino acids within the same group share similar chemical properties. The description of the codes used for each amino acid grouping in the consensus sequence is given in table 4b. Any of the amino acids within one given group of Table 4b represents an alternative amino acid at the position where the corresponding groups code is indicated. The AP2 domain is around 60-70 amino acids in length and has DNA binding activity (Ohme-takagi and Shinshi; Plant Cell 1995; 7:173-182) and when these sequences are aligned, gaps and insertions, typically up to 5 amino acids, may be allowed. It for example binds to the GCC-box present in promoters of pathogenesis-related proteins (Liu et al. 2006. FEBS Lett. 580(5): 1303-8).

TABLE 4b
Description of the amino acid groups used in the AP2 consensus sequence.

| Group | code | Amino Acid Residues |
|---|---|---|
| alcohol | o | S, T |
| aliphatic | l | I, L, V |
| any | x | A, C, D, E, F, G, H, I, K, L, M, N, P, |
| | | Q, R, S, T, V, W, Y |
| aromatic | a | F, H, W, Y |
| charged | c | D, E, H, K, R |
| hydrophobic | h | A, C, F, G, H, I, K, L, M, R, T, V, W, Y |
| negative | y | D, E |
| polar | p | C, D, E, H, K, N, Q, R, S, T |
| positive | z | H, K, R |
| small | s | A, C, D, G, N, P, S, T, V |
| tiny | u | A, G, S |
| turnlike | t | A, C, D, E, G, H, K, N, Q, R, S, T |

“Group” refers to the amino acid classification,
“code” denotes the abbreviation code used for a group,
“residues” indicate the amino acids falling within in a given class.

[0306] Additionally or alternatively, a YiAP2 protein has in increasing order of preference at least 90%, 91%, 92%, 93%, 94%, 95%, 96%, 97%, 98%, or 99% overall sequence identity to the amino acid represented by the consensus sequence of an AP2 domain as represented above (SEQ ID NO: 897).

[0307] Methods to identify an AP2 domain are described herein. Further details are given in the Examples section.

[0308] Additionally or alternatively, the homologue of an YiAP2 protein has in increasing order of preference at least 50%, 51%, 52%, 53%, 54%, 55%, 56%, 57%, 58%, 59%, 60%, 61%, 62%, 63%, 64%, 65%, 66%, 67%, 68%, 69%, 70%, 71%, 72%, 73%, 74%, 75%, 76%, 77%, 78%, 79%, 80%, 81%, 82%, 83%, 84%, 85%, 86%, 87%, 88%, 89%, 90%, 91%, 92%, 93%, 94%, 95%, 96%, 97%, 98%, 99% or 100% overall sequence identity to the amino acid represented by any of the polypeptides of Table A6 most preferably to SEQ ID NO: 836. The overall sequence identity is determined using a global alignment algorithm, such as the Needleman Wunsch algorithm in the program GAP (GCG Wisconsin Package, Accelrys), preferably with default parameters and preferably with sequences of mature proteins (i.e. without taking into account secretion signals or transit peptides). Compared to overall sequence identity, the sequence identity will generally be higher when only conserved domains or motifs are considered.

[0309] Preferably the YiAP2 polypeptide useful in the methods of the invention is capable of binding to a DNA fragment of at least 10, 20, 30, 50, 60, 70, 80, 90, 100, 200, 250, 500, 650, 750, 1000, 1500 nucleotides long comprising one or more GCC boxes (SEQ ID NO: 896: TAAGAGCCGCC) preferably to the promoter DNA fragment used by Ohme-takagi 1995. Methods to assay DNA binding of AP2 domains are well known in the art, for example as described by Yoh-Sakumaa 2002, Biochemical and Biophysical Research Communications, 290, 998-1009) and yeast one hybrid assay maybe used such as described in Middleton et al., 2007 (Plant Cell 19: 1221-1234) or in Kizis and Pages (Plant J. 2002; 30(6):679-89).

[0310] The terms “domain”, “signature” and “motif” are defined in the “definitions” section herein.

[0311] Furthermore, FSM1-like polypeptides (at least in their native form) typically have DNA-binding activity. Tools and techniques for measuring DNA-binding activity (e.g. gel retardation assays) are well known in the art. Further details are provided in Example 6.

[0312] In addition, FSM1-like polypeptides, when expressed in rice according to the methods of the present invention as outlined in Examples 7 and 8, give plants having increased yield related traits, in particular increased seed yield (Example 11).

[0313] Furthermore, PIF3-like polypeptides (at least in their native form) typically have protein binding activity. Tools and techniques for measuring protein binding activity are well known in the art, a well known example is the Yeast Two Hybrid assay. Further details are provided in Example 6.

[0314] In addition, PIF3-like polypeptides, when expressed in rice according to the methods of the present invention as outlined in Examples 7 and 8, give plants having increased yield related traits, in particular early vigour or increased seed yield.

[0315] Furthermore, UROD polypeptides (at least in their native form) typically have uroporphyrinogen II decarboxylase or UROD enzyme activity catalysing the following reaction:

uroporphyrinogen-III<=>4CO2+coproporphyrinogen III.

[0316] UROD is classified in Enzyme Classification code: EC.4.1.1.37.

[0317] Tools and techniques for measuring porphyrin activity are well known in the art and are mainly performed by chromatographic and spectral methods, such as HPLC and TLC (Jacobs and Jacobs, 1993, Plant Physiol. 101(4): 1181-1187) and Magnetic Circular Dichroism (Ivanetich et al., 1984, Clin Chem. 30(3): 391-4). The crystal structure of UROD in plants has been determined by Martins et al., 2001, J Biol. Chem. 276(47): 44108-44116.

[0318] In addition, UROD polypeptides, when expressed in rice according to the methods of the present invention as outlined in the Examples section herein, give plants having increased yield related traits.

[0319] Furthermore, preferably the AS-MTT polypeptide typically have DNA binding activity. Tools and techniques for measuring DNA binding activity are well known in the art.

[0320] In addition, preferably AS-MTT polypeptides, when expressed in rice according to the methods of the present invention as outlined in the Examples section, give plants having increased yield related traits, preferably biomass or seed yield increase preferably when the plant is cultivated under (abiotic) stress conditions.

[0321] Furthermore, EXO-1 polypeptides (at least in their native form) typically have nuclease activity. Tools and techniques for measuring nuclease activity are well known in the art. Further details are provided in Example 6.

[0322] In addition, EXO-1 polypeptides, when expressed in rice according to the methods of the present invention as outlined in Examples 7 and 8, give plants having increased yield related traits, in particular increased biomass, erectness, height, greenness, root mass.

[0323] Furthermore, preferably the YiAP2 polypeptide typically have DNA binding activity. Tools and techniques for measuring DNA binding activity are well known in the art.

[0324] In addition, preferably YiAP2 polypeptides, when expressed in rice according to the methods of the present invention as outlined in the Examples section, give plants having increased yield related traits, preferably increased seed yield.

[0325] Concerning FSM1-like polypeptides, the present invention is illustrated by transforming plants with the nucleic acid sequence represented by SEQ ID NO: 1, encoding the polypeptide sequence of SEQ ID NO: 2. However, performance of the invention is not restricted to these sequences; the methods of the invention may advantageously be performed using any FSM1-like-encoding nucleic acid or FSM1-like polypeptide as defined herein.

[0326] Examples of nucleic acids encoding FSM1-like polypeptides are given in Table A1 of the Examples section herein. Such nucleic acids are useful in performing the methods of the invention. The amino acid sequences given in Table A1 of the Examples section are example sequences of orthologues and paralogues of the FSM1-like polypeptide represented by SEQ ID NO: 2, the terms “orthologues” and “paralogues” being as defined herein. Further orthologues and paralogues may readily be identified by performing a so-called reciprocal blast search as described in the definitions section; where the query sequence is SEQ ID NO: 1 or SEQ ID NO: 2, the second BLAST (back-BLAST) would be against Solanum lycopersicum sequences.

[0327] Concerning PIF3-like polypeptides, the present invention is illustrated by transforming plants with the nucleic acid sequence represented by SEQ ID NO: 292, encoding the polypeptide sequence of SEQ ID NO: 293. However, performance of the invention is not restricted to these sequences; the methods of the invention may advantageously be performed using any PIF3-like-encoding nucleic acid or PIF3-like polypeptide as defined herein.

[0328] Examples of nucleic acids encoding PIF3-like polypeptides are given in Table A2 of the Examples section herein. Such nucleic acids are useful in performing the methods of the invention. The amino acid sequences given in Table A2 of the Examples section are example sequences of orthologues and paralogues of the PIF3-like polypeptide represented by SEQ ID NO: 293, the terms “orthologues” and “paralogues” being as defined herein. Further orthologues and paralogues may readily be identified by performing a so-called reciprocal blast search as described in the definitions section; where the query sequence is SEQ ID NO: 292 or SEQ ID NO: 293, the second BLAST (back-BLAST) would be against rice sequences.

[0329] Concerning UROD polypeptides, the present invention is illustrated by transforming plants with the nucleic acid sequence represented by SEQ ID NO: 367, encoding the polypeptide sequence of SEQ ID NO: 368. However, performance of the invention is not restricted to these sequences; the methods of the invention may advantageously be performed using any UROD-encoding nucleic acid or UROD polypeptide as defined herein.

[0330] Examples of nucleic acids encoding UROD polypeptides are given in Table A3 of the Examples section herein. Such nucleic acids are useful in performing the methods of the invention. The amino acid sequences given in Table A3 of the Examples section are example sequences of orthologues and paralogues of the UROD polypeptide represented by SEQ ID NO: 368, the terms “orthologues” and “paralogues” being as defined herein. Further orthologues and paralogues may readily be identified by performing a so-called reciprocal blast search as described in the definitions section; where the query sequence is SEQ ID NO: 367 or SEQ ID NO: 368, the second BLAST (back-BLAST) would be against Poplar sequences.

[0331] Concerning AS-MTT polypeptides, the present invention is illustrated by transforming plants with the nucleic acid sequence represented by SEQ ID NO: 536, encoding the polypeptide sequence of SEQ ID NO: 537. However, performance of the invention is not restricted to these sequences; the methods of the invention may advantageously be performed using any AS-MTT-encoding nucleic acid or AS-MTT polypeptide as defined herein.

[0332] Examples of nucleic acids encoding AS-MTT polypeptides are given in Table A4 of the Examples section herein. Such nucleic acids are useful in performing the methods of the invention. The amino acid sequences given in Table A4 of the Examples section are example sequences of orthologues and paralogues of the AS-MTT polypeptide represented by SEQ ID NO: 537, the terms “orthologues” and “paralogues” being as defined herein. Further orthologues and paralogues may readily be identified by performing a so-called reciprocal blast search as described in the definitions section; where the query sequence is SEQ ID NO: 536 or SEQ ID NO: 537, the second BLAST (back-BLAST) would be against poplar sequences.

[0333] Concerning EXO-1 polypeptides, the present invention is illustrated by transforming plants with the nucleic acid sequence represented by SEQ ID NO: 762, encoding the polypeptide sequence of SEQ ID NO: 763. However, performance of the invention is not restricted to these sequences; the methods of the invention may advantageously be performed using any EXO-1-encoding nucleic acid or EXO-1 polypeptide as defined herein.

[0334] Examples of nucleic acids encoding EXO-1 polypeptides are given in Table A5 of the Examples section herein. Such nucleic acids are useful in performing the methods of the invention. The amino acid sequences given in Table A5 of the Examples section are example sequences of orthologues and paralogues of the EXO-1 polypeptide represented by SEQ ID NO: 763, the terms “orthologues” and “paralogues” being as defined herein. Further orthologues and paralogues may readily be identified by performing a so-called reciprocal blast search as described in the definitions section; where the query sequence is SEQ ID NO: 762 or SEQ ID NO: 763, the second BLAST (back-BLAST) would be against Populus trichocarpa sequences.

[0335] Concerning YiAP2 polypeptides, the present invention is illustrated by transforming plants with the nucleic acid sequence represented by SEQ ID NO: 835, encoding the polypeptide sequence of SEQ ID NO: 836. However, performance of the invention is not restricted to these sequences; the methods of the invention may advantageously be performed using any YiAP2-encoding nucleic acid or YiAP2 polypeptide as defined herein.

[0336] Examples of nucleic acids encoding YiAP2 polypeptides are given in Table A6 of the Examples section herein. Such nucleic acids are useful in performing the methods of the invention. The amino acid sequences given in Table A6 of the Examples section are example sequences of orthologues and paralogues of the YiAP2 polypeptide represented by SEQ ID NO: 836, the terms “orthologues” and “paralogues” being as defined herein. Further orthologues and paralogues may readily be identified by performing a so-called reciprocal blast search as described in the definitions section; where the query sequence is SEQ ID NO: 835 or SEQ ID NO: 836, the second BLAST (back-BLAST) would be against Medicago truncatula sequences.

[0337] Nucleic acid variants may also be useful in practising the methods of the invention. Examples of such variants include nucleic acids encoding homologues and derivatives of any one of the amino acid sequences given in Table A1 to A6 of the Examples section, the terms “homologue” and “derivative” being as defined herein. Also useful in the methods of the invention are nucleic acids encoding homologues and derivatives of orthologues or paralogues of any one of the amino acid sequences given in Table A1 to A6 of the Examples section. Homologues and derivatives useful in the methods of the present invention have substantially the same biological and functional activity as the unmodified protein from which they are derived. Further variants useful in practising the methods of the invention are variants in which codon usage is optimised or in which miRNA target sites are removed.

[0338] Further nucleic acid variants useful in practising the methods of the invention include portions of nucleic acids encoding FSM1-like polypeptides, or PIF3-like polypeptides, or UROD polypeptides, or AS-MTT polypeptides, or EXO-1 polypeptides, or YiAP2 polypeptides, nucleic acids hybridising to nucleic acids encoding FSM1-like polypeptides, or PIF3-like polypeptides, or UROD polypeptides, or AS-MTT polypeptides, or EXO-1 polypeptides, or YiAP2 polypeptides, splice variants of nucleic acids encoding FSM1-like polypeptides, or PIF3-like polypeptides, or UROD polypeptides, or AS-MTT polypeptides, or EXO-1 polypeptides, or YiAP2 polypeptides, allelic variants of nucleic acids encoding FSM1-like polypeptides, or PIF3-like polypeptides, or UROD polypeptides, or AS-MTT polypeptides, or EXO-1 polypeptides, or YiAP2 polypeptides, and variants of nucleic acids encoding FSM1-like polypeptides, or PIF3-like polypeptides, or UROD polypeptides, or AS-MTT polypeptides, or EXO-1 polypeptides, or YiAP2 polypeptides, obtained by gene shuffling. The terms hybridising sequence, splice variant, allelic variant and gene shuffling are as described herein.

[0339] Nucleic acids encoding FSM1-like polypeptides, or PIF3-like polypeptides, or UROD polypeptides, or AS-MTT polypeptides, or EXO-1 polypeptides, or YiAP2 polypeptides, need not be full-length nucleic acids, since performance of the methods of the invention does not rely on the use of full-length nucleic acid sequences. According to the present invention, there is provided a method for enhancing yield-related traits in plants, comprising introducing and expressing in a plant a portion of any one of the nucleic acid sequences given in Table A1 to A6 of the Examples section, or a portion of a nucleic acid encoding an orthologue, paralogue or homologue of any of the amino acid sequences given in Table A of the Examples section.

[0340] A portion of a nucleic acid may be prepared, for example, by making one or more deletions to the nucleic acid. The portions may be used in isolated form or they may be fused to other coding (or non-coding) sequences in order to, for example, produce a protein that combines several activities. When fused to other coding sequences, the resultant polypeptide produced upon translation may be bigger than that predicted for the protein portion.

[0341] Concerning FSM1-like polypeptides, portions useful in the methods of the invention, encode a FSM1-like polypeptide as defined herein, and have substantially the same biological activity as the amino acid sequences given in Table A1 of the Examples section. Preferably, the portion is a portion of any one of the nucleic acids given in Table A1 of the Examples section, or is a portion of a nucleic acid encoding an orthologue or paralogue of any one of the amino acid sequences given in Table A1 of the Examples section. Preferably the portion is at least 150, 200, 250, 300, 350, 400 consecutive nucleotides in length, the consecutive nucleotides being of any one of the nucleic acid sequences given in Table A1 of the Examples section, or of a nucleic acid encoding an orthologue or paralogue of any one of the amino acid sequences given in Table A1 of the Examples section. Most preferably the portion is a portion of the nucleic acid of SEQ ID NO: 1. Preferably, the portion encodes a fragment of an amino acid sequence comprising a MYB/SANT domain, which when used in the construction of a phylogenetic tree such as the one depicted in FIG. 3, clusters with the group of FSM1-like polypeptides comprising the amino acid sequence represented by SEQ ID NO: 2 rather than with other MYB proteins and which comprises one or more of the motifs 1 to 6 as outlined above.

[0342] Concerning PIF3-like polypeptides, portions useful in the methods of the invention, encode a PIF3-like polypeptide as defined herein, and have substantially the same biological activity as the amino acid sequences given in Table A2 of the Examples section. Preferably, the portion is a portion of any one of the nucleic acids given in Table A2 of the Examples section, or is a portion of a nucleic acid encoding an orthologue or paralogue of any one of the amino acid sequences given in Table A2 of the Examples section. Preferably the portion is at least 500, 550, 600, 650, 700, 750, 800, 850, 900, 950, 1000, 1050, 1100, 1150, 1200, 1250, 1300, 1350, 1400, 1450, 1500, 1550, 1600, 1650, 1700, 1750, 1800, 1850, 1900, 1950, 2000, 2050, 2100, 2150, 2200 consecutive nucleotides in length, the consecutive nucleotides being of any one of the nucleic acid sequences given in Table A2 of the Examples section, or of a nucleic acid encoding an orthologue or paralogue of any one of the amino acid sequences given in Table A2 of the Examples section. Most preferably the portion is a portion of the nucleic acid of SEQ ID NO: 292. Preferably, the portion encodes a fragment of an amino acid sequence which comprises one or more of the motifs as defined above and which, when used in the construction of a phylogenetic tree, such as the one depicted in FIG. 8, clusters with the group of PIF3-like polypeptides comprising the amino acid sequence represented by SEQ ID NO: 293 rather than with any other group of bHLH proteins.

[0343] Concerning UROD polypeptides, portions useful in the methods of the invention, encode a UROD polypeptide as defined herein, and have substantially the same biological activity as the amino acid sequences given in Table A3 of the Examples section. Preferably, the portion is a portion of any one of the nucleic acids given in Table A3 of the Examples section, or is a portion of a nucleic acid encoding an orthologue or paralogue of any one of the amino acid sequences given in Table A3 of the Examples section. Preferably the portion is at least 500, 550, 600, 650, 700, 750, 800, 850, 900, 950, 1000, 1050, 1100, 1150, 1200, 1250 consecutive nucleotides in length, the consecutive nucleotides being of any one of the nucleic acid sequences given in Table A3 of the Examples section, or of a nucleic acid encoding an orthologue or paralogue of any one of the amino acid sequences given in Table A3 of the Examples section. Most preferably the portion is a portion of the nucleic acid of SEQ ID NO: 367. Preferably, the portion encodes a fragment of an amino acid sequence which, when used in the construction of a phylogenetic tree, such as the one depicted in FIG. 12 or 13, clusters with the group of UROD polypeptides comprising the amino acid sequence represented by SEQ ID NO: 368 rather than with any other group and may further comprise any one or more of Motifs 13 to 30.

[0344] Concerning AS-MTT polypeptides, portions useful in the methods of the invention, encode an AS-MTT polypeptide as defined herein, and have substantially the same biological activity as the amino acid sequences given in Table A4 of the Examples section.

[0345] Preferably, the portion is a portion of any one of the nucleic acids given in Table A4 of the Examples section, or is a portion of a nucleic acid encoding an orthologue or paralogue of any one of the amino acid sequences given in Table A4 of the Examples section. Preferably the portion is at least 80, 90, 100, 120, 150, 200, 250, 300, 400, 500, 550, 600, 650, 700, 750, 800, 850, 900, 950, 1000, 1050 consecutive nucleotides in length, the consecutive nucleotides being of any one of the nucleic acid sequences given in Table A4 of the Examples section, or of a nucleic acid encoding an orthologue or paralogue of any one of the amino acid sequences given in Table A4 of the Examples section. Most preferably the portion is a portion of the nucleic acid of SEQ ID NO: 536. Preferably, the portion encodes a fragment of an amino acid sequence which, when used in the construction of a phylogenetic tree such as the one depicted in FIG. 16, clusters within Clade A, preferably with the polypeptide represented by SEQ ID NO: 537.

[0346] Concerning EXO-1 polypeptides, portions useful in the methods of the invention, encode an EXO-1 polypeptide as defined herein, and have substantially the same biological activity as the amino acid sequences given in Table A5 of the Examples section. Preferably, the portion is a portion of any one of the nucleic acids given in Table A5 of the Examples section, or is a portion of a nucleic acid encoding an orthologue or paralogue of any one of the amino acid sequences given in Table A5 of the Examples section. Preferably the portion is at least 500, 550, 600, 650, 700, 750, 800, 850, 900, 950, 1000, 1250, 1500, 1750, 2000, 2250, 2500, 2750, 3000, 3250, 3500, 3750, 4000, 4250, 4500, 4750, 5000 consecutive nucleotides in length, the consecutive nucleotides being of any one of the nucleic acid sequences given in Table A5 of the Examples section, or of a nucleic acid encoding an orthologue or paralogue of any one of the amino acid sequences given in Table A5 of the Examples section. Most preferably the portion is a portion of the nucleic acid of SEQ ID NO: 762. Preferably, the portion encodes a fragment of an amino acid sequence which, when used in the construction of a phylogenetic tree, such as the one depicted in FIG. 19, clusters with the group of EXO-1 polypeptides comprising the amino acid sequence represented by SEQ ID NO: 763 rather than with any other group and/or comprises motifs 40 to 42 and/or has nuclease activity and/or has at least 20% sequence identity to SEQ ID NO: 763.

[0347] Concerning YiAP2 polypeptides, portions useful in the methods of the invention, encode a YiAP2 polypeptide as defined herein, and have substantially the same biological activity as the amino acid sequences given in Table A6 of the Examples section. Preferably, the portion is a portion of any one of the nucleic acids given in Table A6 of the Examples section, or is a portion of a nucleic acid encoding an orthologue or paralogue of any one of the amino acid sequences given in Table A of the Examples section. Preferably the portion is at least 50,100, 200, 300, 400, 500, 550, 600, 650, 700, 750, 800, 850, 900, 950, 1000, 1050, 1100, 1150, 1200 consecutive nucleotides in length, the consecutive nucleotides being of any one of the nucleic acid sequences given in Table A6 of the Examples section, or of a nucleic acid encoding an orthologue or paralogue of any one of the amino acid sequences given in Table A6 of the Examples section. Most preferably the portion is a portion of the nucleic acid of SEQ ID NO: 835. Preferably, the portion encodes a fragment of an amino acid sequence comprising at least Two AP2 domains and at least one of motifs I to VI as described above.

[0348] Another nucleic acid variant useful in the methods of the invention is a nucleic acid capable of hybridising, under reduced stringency conditions, preferably under stringent conditions, with a nucleic acid encoding a FSM1-like polypeptide, or a PIF3 polypeptide, or a UROD polypeptide, or an AS-MTT polypeptide, or an EXO-1 polypeptide, or a YiAP2 polypeptide, as defined herein, or with a portion as defined herein.

[0349] According to the present invention, there is provided a method for enhancing yield-related traits in plants, comprising introducing and expressing in a plant a nucleic acid capable of hybridizing to any one of the nucleic acids given in Table A1 to A6 of the Examples section, or comprising introducing and expressing in a plant a nucleic acid capable of hybridising to a nucleic acid encoding an orthologue, paralogue or homologue of any of the nucleic acid sequences given in Table A1 to A6 of the Examples section.

[0350] Concerning FSM1-like polypeptides, hybridising sequences useful in the methods of the invention encode a FSM1-like polypeptide as defined herein, having substantially the same biological activity as the amino acid sequences given in Table A1 of the Examples section. Preferably, the hybridising sequence is capable of hybridising to the complement of any one of the nucleic acids given in Table A1 of the Examples section, or to a portion of any of these sequences, a portion being as defined above, or the hybridising sequence is capable of hybridising to the complement of a nucleic acid encoding an orthologue or paralogue of any one of the amino acid sequences given in Table A1 of the Examples section. Most preferably, the hybridising sequence is capable of hybridising to the complement of a nucleic acid as represented by SEQ ID NO: 1 or to a portion thereof.

[0351] Preferably, the hybridising sequence encodes a polypeptide comprising a MYB/SANT domain and with an amino acid sequence which, when used in the construction of a phylogenetic tree such as the one depicted in FIG. 3, clusters with the group of FSM1-like polypeptides comprising the amino acid sequence represented by SEQ ID NO: 2 rather than with other MYB proteins and which comprises one or more of the motifs 1 to 6 as outlined above.

[0352] Concerning PIF3-like polypeptides, hybridising sequences useful in the methods of the invention encode a PIF3-like polypeptide as defined herein, having substantially the same biological activity as the amino acid sequences given in Table A2 of the Examples section. Preferably, the hybridising sequence is capable of hybridising to the complement of any one of the nucleic acids given in Table A2 of the Examples section, or to a portion of any of these sequences, a portion being as defined above, or the hybridising sequence is capable of hybridising to the complement of a nucleic acid encoding an orthologue or paralogue of any one of the amino acid sequences given in Table A2 of the Examples section. Most preferably, the hybridising sequence is capable of hybridising to the complement of a nucleic acid as represented by SEQ ID NO: 292 or to a portion thereof.

[0353] Preferably, the hybridising sequence encodes a polypeptide with an amino acid sequence which comprises one or more of the motifs as defined above and which, when used in the construction of a phylogenetic tree, such as the one depicted in FIG. 8, clusters with the group of PIF3-like polypeptides comprising the amino acid sequence represented by SEQ ID NO: 293 rather than with any other group of bHLH proteins.

[0354] Concerning UROD polypeptides, hybridising sequences useful in the methods of the invention encode a UROD polypeptide as defined herein, having substantially the same activity as the amino acid sequences given in Table A3 of the Examples section. Preferably, the hybridising sequence is capable of hybridising to the complement of any one of the nucleic acids given in Table A3 of the Examples section, or to a portion of any of these sequences, a portion being as defined above, or the hybridising sequence is capable of hybridising to the complement of a nucleic acid encoding an orthologue or paralogue of any one of the amino acid sequences given in Table A3 of the Examples section. Most preferably, the hybridising sequence is capable of hybridising to the complement of a nucleic acid as represented by SEQ ID NO: 367 or to a portion thereof.

[0355] Preferably, the hybridising sequence encodes a polypeptide with an amino acid sequence which, when full-length and used in the construction of a phylogenetic tree, such as the one depicted in FIG. 12 or 13, clusters with the group of UROD polypeptides comprising the amino acid sequence represented by SEQ ID NO: 368 rather than with any other group and comprises any one or more of Motifs 13 to 30.

[0356] Concerning AS-MTT polypeptides, hybridising sequences useful in the methods of the invention encode an AS-MTT polypeptide as defined herein, having substantially the same biological activity as the amino acid sequences given in Table A4 of the Examples section. Preferably, the hybridising sequence is capable of hybridising to the complement of any one of the nucleic acids given in Table A4 of the Examples section, or to a portion of any of these sequences, a portion being as defined above, or the hybridising sequence is capable of hybridising to the complement of a nucleic acid encoding an orthologue or paralogue of any one of the amino acid sequences given in Table A4 of the Examples section. Most preferably, the hybridising sequence is capable of hybridising to the complement of a nucleic acid as represented by SEQ ID NO: 536 or to a portion thereof.

[0357] Preferably, the hybridising sequence encodes a polypeptide with an amino acid sequence which, when full-length and used in the construction of a phylogenetic tree, such as the one depicted in FIG. 16, clusters within Clade A, preferably with the polypeptide represented by SEQ ID NO: 537.

[0358] Concerning EXO-1 polypeptides, hybridising sequences useful in the methods of the invention encode an EXO-1 polypeptide as defined herein, having substantially the same biological activity as the amino acid sequences given in Table A5 of the Examples section. Preferably, the hybridising sequence is capable of hybridising to the complement of any one of the nucleic acids given in Table A5 of the Examples section, or to a portion of any of these sequences, a portion being as defined above, or the hybridising sequence is capable of hybridising to the complement of a nucleic acid encoding an orthologue or paralogue of any one of the amino acid sequences given in Table A5 of the Examples section. Most preferably, the hybridising sequence is capable of hybridising to the complement of a nucleic acid as represented by SEQ ID NO: 762 or to a portion thereof.

[0359] Preferably, the hybridising sequence encodes a polypeptide with an amino acid sequence which, when full-length and used in the construction of a phylogenetic tree, such as the one depicted in FIG. 19, clusters with the group of EXO-1 polypeptides comprising the amino acid sequence represented by SEQ ID NO: 763 rather than with any other group an/or comprises motifs 40 to 42 and/or has nuclease activity and/or has at least 20% sequence identity to SEQ ID NO: 762.

[0360] Hybridising sequences useful in the methods of the invention encode a YiAP2 polypeptide as defined herein, having substantially the same biological activity as the amino acid sequences given in Table A6 of the Examples section. Preferably, the hybridising sequence is capable of hybridising to the complement of any one of the nucleic acids given in Table A6 of the Examples section, or to a portion of any of these sequences, a portion being as defined above, or the hybridising sequence is capable of hybridising to the complement of a nucleic acid encoding an orthologue or paralogue of any one of the amino acid sequences given in Table A6 of the Examples section. Most preferably, the hybridising sequence is capable of hybridising to the complement of a nucleic acid as represented by SEQ ID NO: 835 or to a portion thereof.

[0361] Preferably, the hybridising sequence encodes a polypeptide with an amino acid sequence comprising at least two AP2 domains and at least one of motifs 43 to 48 as described above.

[0362] Another nucleic acid variant useful in the methods of the invention is a splice variant encoding a FSM1-like polypeptide, or a PIF3 polypeptide, or a UROD polypeptide, or an AS-MTT polypeptide, or an EXO-1 polypeptide, or a YiAP2 polypeptide, as defined hereinabove, a splice variant being as defined herein.

[0363] According to the present invention, there is provided a method for enhancing yield-related traits in plants, comprising introducing and expressing in a plant a splice variant of any one of the nucleic acid sequences given in Table A1 to A6 of the Examples section, or a splice variant of a nucleic acid encoding an orthologue, paralogue or homologue of any of the amino acid sequences given in Table A1 to A6 of the Examples section.

[0364] Concerning FSM1-like polypeptides, preferred splice variants are splice variants of a nucleic acid represented by SEQ ID NO: 1, or a splice variant of a nucleic acid encoding an orthologue or paralogue of SEQ ID NO: 2. Preferably, the amino acid sequence encoded by the splice variant comprises a MYB/SANT domain and has a sequence which, when used in the construction of a phylogenetic tree such as the one depicted in FIG. 3, clusters with the group of FSM1-like polypeptides comprising the amino acid sequence represented by SEQ ID NO: 2 rather than with other MYB proteins, and which comprises one or more of the motifs 1 to 6 as outlined above.

[0365] Concerning PIF3-like polypeptides, preferred splice variants are splice variants of a nucleic acid represented by SEQ ID NO: 292, or a splice variant of a nucleic acid encoding an orthologue or paralogue of SEQ ID NO: 293. Preferably, the amino acid sequence encoded by the splice variant comprises one or more of the motifs as defined above and, when used in the construction of a phylogenetic tree such as the one depicted in FIG. 8, clusters with the group of PIF3-like polypeptides comprising the amino acid sequence represented by SEQ ID NO: 293 rather than with any other group of bHLH proteins.

[0366] Concerning UROD polypeptides, preferred splice variants are splice variants of a nucleic acid represented by SEQ ID NO: 367, or a splice variant of a nucleic acid encoding an orthologue or paralogue of SEQ ID NO: 368. Preferably, the amino acid sequence encoded by the splice variant, when used in the construction of a phylogenetic tree, such as the one depicted in FIG. 12, clusters with the group of UROD polypeptides comprising the amino acid sequence represented by SEQ ID NO: 368 rather than with any other group and comprises any one or more of Motifs 13 to 30.

[0367] Concerning AS-MTT polypeptides, preferred splice variants are splice variants of a nucleic acid represented by SEQ ID NO: 536, or a splice variant of a nucleic acid encoding an orthologue or paralogue of SEQ ID NO: 537. Preferably, the amino acid sequence encoded by the splice variant, when used in the construction of a phylogenetic tree such as the one depicted in FIG. 16, clusters within Clade A, preferably with the polypeptide represented by SEQ ID NO: 537.

[0368] Concerning EXO-1 polypeptides, preferred splice variants are splice variants of a nucleic acid represented by SEQ ID NO: 762, or a splice variant of a nucleic acid encoding an orthologue or paralogue of SEQ ID NO: 763. Preferably, the amino acid sequence encoded by the splice variant, when used in the construction of a phylogenetic tree, such as the one depicted in FIG. 19, clusters with the group of EXO-1 polypeptides nucleases comprising the amino acid sequence represented by SEQ ID NO: 763 rather than with any other group and/or comprises motifs 40 to 42 and/or has nuclease activity and/or has at least 20% sequence identity to SEQ ID NO: 763.

[0369] Concerning YiAP2 polypeptides, preferred splice variants are splice variants of a nucleic acid represented by SEQ ID NO: 835, or a splice variant of a nucleic acid encoding an orthologue or paralogue of SEQ ID NO: 836. Preferably, the amino acid sequence encoded by the splice variant comprises at least two AP2 domains and at least one of motifs 43 to 48 as described above.

[0370] Another nucleic acid variant useful in performing the methods of the invention is an allelic variant of a nucleic acid encoding a FSM1-like polypeptide, or a PIF3 polypeptide, or a UROD polypeptide, or an AS-MTT polypeptide, or an EXO-1 polypeptide, or a YiAP2 polypeptide, as defined hereinabove, an allelic variant being as defined herein.

[0371] According to the present invention, there is provided a method for enhancing yield-related traits in plants, comprising introducing and expressing in a plant an allelic variant of any one of the nucleic acids given in Table A1 to A6 of the Examples section, or comprising introducing and expressing in a plant an allelic variant of a nucleic acid encoding an orthologue, paralogue or homologue of any of the amino acid sequences given in Table A1 to A6 of the Examples section.

[0372] Concerning FSM1-like polypeptides, the polypeptides encoded by allelic variants useful in the methods of the present invention have substantially the same biological activity as the FSM1-like polypeptide of SEQ ID NO: 2 and any of the amino acids depicted in Table A1 of the Examples section. Allelic variants exist in nature, and encompassed within the methods of the present invention is the use of these natural alleles. Preferably, the allelic variant is an allelic variant of SEQ ID NO: 1 or an allelic variant of a nucleic acid encoding an orthologue or paralogue of SEQ ID NO: 2. Preferably, the amino acid sequence encoded by the allelic variant comprises a MYB/SANT domain and has a sequence which, when used in the construction of a phylogenetic tree such as the one depicted in FIG. 3, clusters with the group of FSM1-like polypeptides comprising the amino acid sequence represented by SEQ ID NO: 2 rather than with other MYB proteins and which comprises one or more of the motifs 1 to 6 as outlined above.

[0373] Concerning PIF3-like polypeptides, the polypeptides encoded by allelic variants useful in the methods of the present invention have substantially the same biological activity as the PIF3-like polypeptide of SEQ ID NO: 293 and any of the amino acids depicted in Table A2 of the Examples section. Allelic variants exist in nature, and encompassed within the methods of the present invention is the use of these natural alleles. Preferably, the allelic variant is an allelic variant of SEQ ID NO: 292 or an allelic variant of a nucleic acid encoding an orthologue or paralogue of SEQ ID NO: 293. Preferably, the amino acid sequence encoded by the allelic variant comprises one or more of the motifs as defined above and, when used in the construction of a phylogenetic tree such as the one depicted in FIG. 8, clusters with the group of PIF3-like polypeptides comprising the amino acid sequence represented by SEQ ID NO: 293 rather than with any other group of bHLH proteins.

[0374] Concerning UROD polypeptides, the polypeptides encoded by allelic variants useful in the methods of the present invention have substantially the same biological activity as the UROD polypeptide of SEQ ID NO: 368 and any of the amino acids depicted in Table A3 of the Examples section. Allelic variants exist in nature, and encompassed within the methods of the present invention is the use of these natural alleles. Preferably, the allelic variant is an allelic variant of SEQ ID NO: 367 or an allelic variant of a nucleic acid encoding an orthologue or paralogue of SEQ ID NO: 368. Preferably, the amino acid sequence encoded by the allelic variant, when used in the construction of a phylogenetic tree, such as the one depicted in FIG. 12 or 13, clusters with the UROD polypeptides comprising the amino acid sequence represented by SEQ ID NO: 368 rather than with any other group and comprises any one or more of Motifs 13 to 30.

[0375] Concerning AS-MTT polypeptides, the polypeptides encoded by allelic variants useful in the methods of the present invention have substantially the same biological activity as the AS-MTT polypeptide of SEQ ID NO: 537 and any of the amino acids depicted in Table A4 of the Examples section. Allelic variants exist in nature, and encompassed within the methods of the present invention is the use of these natural alleles. Preferably, the allelic variant is an allelic variant of SEQ ID NO: 536 or an allelic variant of a nucleic acid encoding an orthologue or paralogue of SEQ ID NO: 537. Preferably, the amino acid sequence encoded by the allelic variant, when used in the construction of a phylogenetic tree, such as the one depicted in FIG. 16, clusters within Clade A, preferably with the polypeptide represented by SEQ ID NO: 537.

[0376] Concerning EXO-1 polypeptides, the polypeptides encoded by allelic variants useful in the methods of the present invention have substantially the same biological activity as the EXO-1 polypeptide of SEQ ID NO: 763 and any of the amino acids depicted in Table A5 of the Examples section. Allelic variants exist in nature, and encompassed within the methods of the present invention is the use of these natural alleles. Preferably, the allelic variant is an allelic variant of SEQ ID NO: 762 or an allelic variant of a nucleic acid encoding an orthologue or paralogue of SEQ ID NO: 763. Preferably, the amino acid sequence encoded by the allelic variant, when used in the construction of a phylogenetic tree, such as the one depicted in FIG. 20, clusters with the EXO-1 polypeptides nucleases comprising the amino acid sequence represented by SEQ ID NO: 763 rather than with any other group and/or comprises motifs 40 to 42 and/or has nuclease activity and/or has at least 20% sequence identity to SEQ ID NO: 763.

[0377] Concerning YiAP2 polypeptides, the polypeptides encoded by allelic variants useful in the methods of the present invention have substantially the same biological activity as the YiAP2 polypeptide of SEQ ID NO: 836 and any of the amino acids depicted in Table A6 of the Examples section. Allelic variants exist in nature, and encompassed within the methods of the present invention is the use of these natural alleles. Preferably, the allelic variant is an allelic variant of SEQ ID NO: 835 or an allelic variant of a nucleic acid encoding an orthologue or paralogue of SEQ ID NO: 836. Preferably, the amino acid sequence encoded by the allelic variant comprises at least two AP2 domains and at least one of motifs 43 to 48 as described above.

[0378] Gene shuffling or directed evolution may also be used to generate variants of nucleic acids encoding FSM1-like polypeptides, or PIF3-like polypeptides, or UROD polypeptides, or AS-MTT polypeptides, or EXO-1 polypeptides, or YiAP2 polypeptides, as defined above; the term “gene shuffling” being as defined herein.

[0379] According to the present invention, there is provided a method for enhancing yield-related traits in plants, comprising introducing and expressing in a plant a variant of any one of the nucleic acid sequences given in Table A1 to A6 of the Examples section, or comprising introducing and expressing in a plant a variant of a nucleic acid encoding an orthologue, paralogue or homologue of any of the amino acid sequences given in Table A1 to A6 of the Examples section, which variant nucleic acid is obtained by gene shuffling.

[0380] Concerning FSM1-like polypeptides, preferably, the amino acid sequence encoded by the variant nucleic acid obtained by gene shuffling comprises a MYB/SANT domain and has a sequence which, when used in the construction of a phylogenetic tree such as the one depicted in FIG. 3, clusters with the group of FSM1-like polypeptides comprising the amino acid sequence represented by SEQ ID NO: 2 rather than with other MYB proteins, and which comprises one or more of the motifs 1 to 6 as outlined above.

[0381] Concerning PIF3-like polypeptides, preferably, the amino acid sequence encoded by the variant nucleic acid obtained by gene shuffling comprises one or more of the motifs as defined above and, when used in the construction of a phylogenetic tree, such as the one depicted in FIG. 8, clusters with the group of PIF3-like polypeptides comprising the amino acid sequence represented by SEQ ID NO: 293 rather than with any other group of bHLH proteins.

[0382] Concerning UROD polypeptides, preferably, the amino acid sequence encoded by the variant nucleic acid obtained by gene shuffling, when used in the construction of a phylogenetic tree such as the one depicted in FIG. 12 or 13, clusters with the group of UROD polypeptides comprising the amino acid sequence represented by SEQ ID NO: 368 rather than with any other group and comprises any one or more of Motifs 13 to 30.

[0383] Concerning AS-MTT polypeptides, preferably, the amino acid sequence encoded by the variant nucleic acid obtained by gene shuffling, when used in the construction of a phylogenetic tree such as the one depicted in FIG. 16, clusters within Clade A, preferably with the polypeptide represented by SEQ ID NO: 537.

[0384] Concerning EXO-1 polypeptides, preferably, the amino acid sequence encoded by the variant nucleic acid obtained by gene shuffling, when used in the construction of a phylogenetic tree such as the one depicted in FIG. 19, clusters with the group of EXO-1 polypeptides nucleases comprising the amino acid sequence represented by SEQ ID NO: 763 rather than with any other group and/or comprises motifs 40 to 42 and/or has nuclease activity and/or has at least 20% sequence identity to SEQ ID NO: 763.

[0385] Concerning YiAP2 polypeptides, preferably, the amino acid sequence encoded by the variant nucleic acid obtained by gene shuffling comprises at least two AP2 domains and at least one of motifs 43 to 48 as described above.

[0386] Furthermore, nucleic acid variants may also be obtained by site-directed mutagenesis. Several methods are available to achieve site-directed mutagenesis, the most common being PCR based methods (Current Protocols in Molecular Biology. Wiley Eds.).

[0387] Nucleic acids encoding FSM1-like polypeptides may be derived from any natural or artificial source. The nucleic acid may be modified from its native form in composition and/or genomic environment through deliberate human manipulation. Preferably the FSM1-like polypeptide-encoding nucleic acid is from a plant, further preferably from a dicotyledonous plant, more preferably from the family Solanaceae, most preferably the nucleic acid is from Solanum lycopersicum.

[0388] Nucleic acids encoding PIF3-like polypeptides may be derived from any natural or artificial source. The nucleic acid may be modified from its native form in composition and/or genomic environment through deliberate human manipulation. Preferably the PIF3-like polypeptide-encoding nucleic acid is from a plant, further preferably from a monocotyledonous plant, more preferably from the family Poaceae, most preferably the nucleic acid is from Oryza sativa.

[0389] Nucleic acids encoding UROD polypeptides may be derived from any natural or artificial source. The nucleic acid may be modified from its native form in composition and/or genomic environment through deliberate human manipulation. Preferably the UROD polypeptide-encoding nucleic acid is from a plant, further preferably from the family Salicaceae, most preferably the nucleic acid is from the genus Populus, most preferably from the species P. trichocarpa.

[0390] Nucleic acids encoding AS-MTT polypeptides may be derived from any natural or artificial source. The nucleic acid may be modified from its native form in composition and/or genomic environment through deliberate human manipulation. Preferably the AS-MTT polypeptide-encoding nucleic acid is from a plant, further preferably from a dicotyledonous plant, more preferably from the genus Populus, most preferably the nucleic acid is from Populus trichocarpa.

[0391] Nucleic acids encoding EXO-1 polypeptides may be derived from any natural or artificial source. The nucleic acid may be modified from its native form in composition and/or genomic environment through deliberate human manipulation. Preferably the EXO-1 polypeptide-encoding nucleic acid is from a plant, further preferably from a dicotyledonous plant, more preferably from the family Salicaceae, most preferably the nucleic acid is from Populus trichocarpa.

[0392] Nucleic acids encoding YiAP2 polypeptides may be derived from any natural or artificial source. The nucleic acid may be modified from its native form in composition and/or genomic environment through deliberate human manipulation. Preferably the YiAP2 polypeptide-encoding nucleic acid is from a plant, further preferably from a dicotyledonous plant, more preferably from the leguminous family, most preferably the nucleic acid is from Medicago truncatula.

[0393] Performance of the methods of the invention gives plants having enhanced yield-related traits. In particular performance of the methods of the invention gives plants having increased early vigour and/or increased yield, especially increased seed yield relative to control plants. The terms “yield” and “seed yield” are described in more detail in the “definitions” section herein.

[0394] Reference herein to enhanced yield-related traits is taken to mean an increase early vigour and/or in biomass (weight) of one or more parts of a plant, which may include aboveground (harvestable) parts and/or (harvestable) parts below ground. In particular, such harvestable parts are vegetative parts of the plant, but seeds are also included in said harvestable parts. Performance of the methods of the invention results in plants having increased biomass and seed yield relative to the plant biomass and seed yield of control plants.

[0395] The present invention provides a method for increasing yield-related traits, especially seed yield of plants and/or biomass (harvestable parts below ground), relative to control plants, which method comprises modulating expression in a plant of a nucleic acid encoding a FSM1-like polypeptide as defined herein.

[0396] The present invention also provides a method for increasing yield-related traits, especially early vigour and/or seed yield of plants, relative to control plants, which method comprises modulating expression in a plant of a nucleic acid encoding a PIF3-like polypeptide as defined herein.

[0397] The present invention also provides a method for increasing yield, especially seed yield of plants, relative to control plants, which method comprises modulating expression in a plant of a nucleic acid encoding a UROD polypeptide as defined herein.

[0398] The present invention also provides a method for increasing (yield-related traits—yield), especially seed yield of plants, relative to control plants, which method comprises modulating expression in a plant of a nucleic acid encoding an AS-MTT polypeptide as defined herein.

[0399] The present invention also provides a method for increasing yield-related traits, relative to control plants, which method comprises modulating expression in a plant of a nucleic acid encoding an EXO-1 polypeptide as defined herein.

[0400] The present invention also provides a method for enhancing yield-related traits, especially seed yield of plants, relative to control plants, which method comprises modulating expression in a plant of a nucleic acid encoding a YiAP2 polypeptide as defined herein.

[0401] Since the transgenic plants according to the present invention have increased yield related traits, it is likely that these plants exhibit an increased growth rate (during at least part of their life cycle), relative to the growth rate of control plants at a corresponding stage in their life cycle.

[0402] According to a preferred feature of the present invention, performance of the methods of the invention gives plants having an increased growth rate relative to control plants. Therefore, according to the present invention, there is provided a method for increasing the growth rate of plants, which method comprises modulating expression in a plant of a nucleic acid encoding a FSM1-like polypeptide, or a PIF3 polypeptide, or a UROD polypeptide, or an AS-MTT polypeptide, or an EXO-1 polypeptide, or a YiAP2 polypeptide, as defined herein.

[0403] Performance of the methods of the invention gives plants grown under non-stress conditions or under mild drought conditions increased yield relative to control plants grown under comparable conditions. Therefore, according to the present invention, there is provided a method for increasing yield in plants grown under non-stress conditions or under mild drought conditions, which method comprises modulating expression in a plant of a nucleic acid encoding a FSM1-like polypeptide, or a PIF3 polypeptide, or a UROD polypeptide, or an AS-MTT polypeptide, or an EXO-1 polypeptide, or a YiAP2 polypeptide.

[0404] In alternative, performance of the methods of the invention gives plants grown under drought-stress conditions or under mild drought conditions increased yield relative to control plants grown under comparable conditions. Therefore, according to the present invention, there is provided a method for increasing yield in plants grown under drought-stress conditions or under mild drought conditions, which method comprises modulating expression in a plant of a nucleic acid encoding an EXO-1 polypeptide.

[0405] Performance of the methods of the invention gives plants grown under conditions of nutrient deficiency, particularly under conditions of nitrogen deficiency, increased yield relative to control plants grown under comparable conditions. Therefore, according to the present invention, there is provided a method for increasing yield in plants grown under conditions of nutrient deficiency, which method comprises modulating expression in a plant of a nucleic acid encoding a FSM1-like polypeptide, or a PIF3 polypeptide, or a UROD polypeptide, or an AS-MTT polypeptide, or an EXO-1 polypeptide, or a YiAP2 polypeptide.

[0406] Performance of the methods of the invention gives plants grown under conditions of salt stress, increased yield relative to control plants grown under comparable conditions. Therefore, according to the present invention, there is provided a method for increasing yield in plants grown under conditions of salt stress, which method comprises modulating expression in a plant of a nucleic acid encoding a FSM1-like polypeptide, or a PIF3 polypeptide, or a UROD polypeptide, or an AS-MTT polypeptide, or an EXO-1 polypeptide, or a YiAP2 polypeptide.

[0407] The invention also provides genetic constructs and vectors to facilitate introduction and/or expression in plants of nucleic acids encoding FSM1-like polypeptides, or PIF3-like polypeptides, or UROD polypeptides, or AS-MTT polypeptides, or EXO-1 polypeptides, or YiAP2 polypeptides. The gene constructs may be inserted into vectors, which may be commercially available, suitable for transforming into plants and suitable for expression of the gene of interest in the transformed cells. The invention also provides use of a gene construct as defined herein in the methods of the invention.

[0408] More specifically, the present invention provides a construct comprising:
[0409] (a) a nucleic acid encoding a FSM1-like polypeptide, or a PIF3 polypeptide, or a UROD polypeptide, or an AS-MTT polypeptide, or an EXO-1 polypeptide, or a YiAP2 polypeptide, as defined above;
[0410] (b) one or more control sequences capable of driving expression of the nucleic acid sequence of (a); and optionally
[0411] (c) a transcription termination sequence.

[0412] Preferably, the nucleic acid encoding a FSM1-like polypeptide, or a PIF3 polypeptide, or a UROD polypeptide, or an AS-MTT polypeptide, or an EXO-1 polypeptide, or a YiAP2 polypeptide, is as defined above. The term “control sequence” and “termination sequence” are as defined herein.

[0413] Plants are transformed with a vector comprising any of the nucleic acids described above. The skilled artisan is well aware of the genetic elements that must be present on the vector in order to successfully transform, select and propagate host cells containing the sequence of interest. The sequence of interest is operably linked to one or more control sequences (at least to a promoter).

[0414] Advantageously, any type of promoter, whether natural or synthetic, may be used to drive expression of the nucleic acid sequence, but preferably the promoter is of plant origin. A constitutive promoter is particularly useful in the methods. Preferably the constitutive promoter is a ubiquitous constitutive promoter of medium strength. See the “Definitions” section herein for definitions of the various promoter types.

[0415] Concerning FSM1-like polypeptides, it should be clear that the applicability of the present invention is not restricted to the FSM1-like polypeptide-encoding nucleic acid represented by SEQ ID NO: 1, nor is the applicability of the invention restricted to expression of a FSM1-like polypeptide-encoding nucleic acid when driven by a constitutive promoter.

[0416] Preferably, the medium strength constitutive promoter is derived from a plant, such as a GOS2 promoter, more preferably it is the GOS2 promoter of rice. Furthermore preferably the constitutive promoter is represented by a nucleic acid sequence substantially similar to SEQ ID NO: 289, most preferably the constitutive promoter is as represented by SEQ ID NO: 289. See the “Definitions” section herein for further examples of constitutive promoters.

[0417] Optionally, one or more terminator sequences may be used in the construct introduced into a plant. Preferably, the construct comprises an expression cassette comprising a GOS2 promoter, substantially similar to SEQ ID NO: 289, and the nucleic acid encoding the FSM1-like polypeptide.

[0418] Concerning PIF3-like polypeptides, it should be clear that the applicability of the present invention is not restricted to the PIF3-like polypeptide-encoding nucleic acid represented by SEQ ID NO: 292, nor is the applicability of the invention restricted to expression of a PIF3-like polypeptide-encoding nucleic acid when driven by a constitutive promoter.

[0419] The constitutive promoter is preferably a medium strength promoter, more preferably selected from a plant, such as a GOS2 promoter, most preferably the promoter is the GOS2 promoter from rice. Further preferably the constitutive promoter is represented by a nucleic acid sequence substantially similar to SEQ ID NO: 366, most preferably the constitutive promoter is as represented by SEQ ID NO: 366. See the “Definitions” section herein for further examples of constitutive promoters.

[0420] Optionally, one or more terminator sequences may be used in the construct introduced into a plant. Preferably, the construct comprises an expression cassette comprising a GOS2 promoter, substantially similar to SEQ ID NO: 366, and the nucleic acid encoding the PIF3-like polypeptide.

[0421] Concerning UROD polypeptides, it should be clear that the applicability of the present invention is not restricted to the UROD polypeptide-encoding nucleic acid represented by SEQ ID NO: 367, nor is the applicability of the invention restricted to expression of a UROD polypeptide-encoding nucleic acid when driven by a constitutive promoter.

[0422] The constitutive promoter is preferably a medium strength promoter, more preferably selected from a plant derived promoter, such as a GOS2 promoter, more preferably is the promoter GOS2 promoter from rice. Further preferably the constitutive promoter is represented by a nucleic acid sequence substantially similar to SEQ ID NO: 533, most preferably the constitutive promoter is as represented by SEQ ID NO: 533. See the “Definitions” section herein for further examples of constitutive promoters.

[0423] Optionally, one or more terminator sequences may be used in the construct introduced into a plant. Preferably, the construct comprises an expression cassette comprising a GOS2 promoter, substantially similar to SEQ ID NO: 533, and the nucleic acid encoding the UROD polypeptide.

[0424] Concerning AS-MTT polypeptides, it should be clear that the applicability of the present invention is not restricted to the AS-MTT polypeptide-encoding nucleic acid represented by SEQ ID NO: 536, nor is the applicability of the invention restricted to expression of an AS-MTT polypeptide-encoding nucleic acid when driven by a constitutive promoter.

[0425] The constitutive promoter is preferably a medium strength promoter, more preferably selected from a plant derived promoter, such as a GOS2 promoter, more preferably is the promoter GOS2 promoter from rice. Further preferably the constitutive promoter is represented by a nucleic acid sequence substantially similar to SEQ ID NO: 659, most preferably the constitutive promoter is as represented by SEQ ID NO: 659. See the “Definitions” section herein for further examples of constitutive promoters.

[0426] Concerning EXO-1 polypeptides, it should be clear that the applicability of the present invention is not restricted to the EXO-1 polypeptide-encoding nucleic acid represented by SEQ ID NO: 762, nor is the applicability of the invention restricted to expression of an EXO-1 polypeptide-encoding nucleic acid when driven by a constitutive promoter.

[0427] The constitutive promoter is preferably a medium strength promoter, more preferably selected from a plant derived promoter, such as a GOS2 promoter, more preferably is the promoter GOS2 promoter from rice. Further preferably the constitutive promoter is represented by a nucleic acid sequence substantially similar to SEQ ID NO: 831, most preferably the constitutive promoter is as represented by SEQ ID NO: 831. See the “Definitions” section herein for further examples of constitutive promoters.

[0428] According to another preferred feature of the invention, the nucleic acid encoding an EXO-1 polypeptide is operably linked to a tissue-specific promoter, more preferably a shoot-specific promoter. The shoot-specific promoter is preferably beta expansin promoter (WO 2004/070039), more preferably the beta expansin EXPB9 promoter from rice. Further preferably the EXPB9 promoter is represented by a nucleic acid sequence substantially similar to SEQ ID NO: 832, most preferably the promoter is as represented by SEQ ID NO: 832. Examples of other shoot-specific promoters which may also be used to perform the methods of the invention are shown in Table 2b in the “Definitions” section above.

[0429] Optionally, one or more terminator sequences may be used in the construct introduced into a plant. Preferably, the construct comprises an expression cassette comprising a GOS2 or EXPB9 promoter, substantially similar to SEQ ID NO: 831 or SEQ ID NO: 832, and the nucleic acid encoding the EXO-1 polypeptide.

[0430] Concerning YiAP2 polypeptides, it should be clear that the applicability of the present invention is not restricted to the YiAP2 polypeptide-encoding nucleic acid represented by SEQ ID NO: 835, nor is the applicability of the invention restricted to expression of a YiAP2 polypeptide-encoding nucleic acid when driven by a constitutive promoter.

[0431] The constitutive promoter is preferably a medium strength promoter, more preferably selected from a plant derived promoter, such as a GOS2 promoter, more preferably is the promoter GOS2 promoter from rice. Further preferably the constitutive promoter is represented by a nucleic acid sequence substantially similar to SEQ ID NO: 889, most preferably the constitutive promoter is as represented by SEQ ID NO: 889. See the “Definitions” section herein for further examples of constitutive promoters.

[0432] According to a preferred feature of the invention, the modulated expression is increased expression. Methods for increasing expression of nucleic acids or genes, or gene products, are well documented in the art and examples are provided in the definitions section.

[0433] As mentioned above, a preferred method for modulating expression of a nucleic acid encoding a FSM1-like polypeptide, or a PIF3 polypeptide, or a UROD polypeptide, or an AS-MTT polypeptide, or an EXO-1 polypeptide, or a YiAP2 polypeptide, is by introducing and expressing in a plant a nucleic acid encoding a FSM1-like polypeptide, or a PIF3 polypeptide, or a UROD polypeptide, or an AS-MTT polypeptide, or an EXO-1 polypeptide, or a YiAP2 polypeptide; however the effects of performing the method, i.e. enhancing yield-related traits may also be achieved using other well known techniques, including but not limited to T-DNA activation tagging, TILLING, homologous recombination. A description of these techniques is provided in the definitions section.

[0434] The invention also provides a method for the production of transgenic plants having enhanced yield-related traits relative to control plants, comprising introduction and expression in a plant of any nucleic acid encoding a FSM1-like polypeptide, or a PIF3 polypeptide, or a UROD polypeptide, or an AS-MTT polypeptide, or an EXO-1 polypeptide, or a YiAP2 polypeptide, as defined hereinabove.

[0435] More specifically, the present invention provides a method for the production of transgenic plants having enhanced yield-related traits, particularly increased yield (seed yield and/or biomass of below ground plant parts), which method comprises:
[0436] (i) introducing and expressing in a plant or plant cell a nucleic acid encoding a FSM1-like polypeptide, or a PIF3 polypeptide, or a UROD polypeptide, or an AS-MTT polypeptide, or an EXO-1 polypeptide, or a YiAP2 polypeptide; and
[0437] (ii) cultivating the plant cell under conditions promoting plant growth and development.

[0438] The nucleic acid of (i) may be any of the nucleic acids capable of encoding a FSM1-like polypeptide, or a PIF3 polypeptide, or a UROD polypeptide, or an AS-MTT polypeptide, or an EXO-1 polypeptide, or a YiAP2 polypeptide, as defined herein.

[0439] The nucleic acid may be introduced directly into a plant cell or into the plant itself (including introduction into a tissue, organ or any other part of a plant). According to a preferred feature of the present invention, the nucleic acid is preferably introduced into a plant by transformation. The term “transformation” is described in more detail in the “definitions” section herein.

[0440] The present invention clearly extends to any plant cell or plant produced by any of the methods described herein, and to all plant parts and propagules thereof. The present invention encompasses plants or parts thereof (including seeds) obtainable by the methods according to the present invention. The plants or parts thereof comprise a nucleic acid transgene encoding a FSM1-like polypeptide, or a PIF3 polypeptide, or a UROD polypeptide, or an AS-MTT polypeptide, or an EXO-1 polypeptide, or a YiAP2 polypeptide, as defined above. The present invention extends further to encompass the progeny of a primary transformed or transfected cell, tissue, organ or whole plant that has been produced by any of the aforementioned methods, the only requirement being that progeny exhibit the same genotypic and/or phenotypic characteristic(s) as those produced by the parent in the methods according to the invention.

[0441] The invention also includes host cells containing an isolated nucleic acid encoding a FSM1-like polypeptide, or a PIF3 polypeptide, or a UROD polypeptide, or an AS-MTT polypeptide, or an EXO-1 polypeptide, or a YiAP2 polypeptide, as defined hereinabove. Preferred host cells according to the invention are plant cells. Host plants for the nucleic acids or the vector used in the method according to the invention, the expression cassette or construct or vector are, in principle, advantageously all plants, which are capable of synthesizing the polypeptides used in the inventive method.

[0442] The methods of the invention are advantageously applicable to any plant. Plants that are particularly useful in the methods of the invention include all plants which belong to the superfamily Viridiplantae, in particular monocotyledonous and dicotyledonous plants including fodder or forage legumes, ornamental plants, food crops, trees or shrubs. According to a preferred embodiment of the present invention, the plant is a crop plant. Examples of crop plants include soybean, sunflower, canola, alfalfa, rapeseed, sugar beet, linseed, cotton, tomato, potato and tobacco. Further preferably, the plant is a monocotyledonous plant. Examples of monocotyledonous plants include sugarcane. More preferably the plant is a cereal. Examples of cereals include rice, maize, wheat, barley, millet, rye, triticale, sorghum, emmer, spelt, secale, einkorn, teff, milo and oats.

[0443] The invention also extends to harvestable parts of a plant such as, but not limited to seeds, leaves, fruits, flowers, stems, roots, rhizomes, tubers and bulbs, which harvestable parts comprise a recombinant nucleic acid encoding a FSM1-like polypeptide. The invention furthermore relates to products derived, preferably directly derived, from a harvestable part of such a plant, such as dry pellets or powders, oil, fat and fatty acids, starch or proteins.

[0444] The present invention also encompasses use of nucleic acids encoding FSM1-like polypeptides as described herein and use of these FSM1-like polypeptides, or PIF3-like polypeptides, or UROD polypeptides, or AS-MTT polypeptides, or EXO-1 polypeptides, or YiAP2 polypeptides, in enhancing any of the aforementioned yield-related traits in plants. For example, nucleic acids encoding a FSM1-like polypeptide, or a PIF3 polypeptide, or a UROD polypeptide, or an AS-MTT polypeptide, or an EXO-1 polypeptide, or a YiAP2 polypeptide, described herein, or the FSM1-like polypeptides, or PIF3-like polypeptides, or UROD polypeptides, or AS-MTT polypeptides, or EXO-1 polypeptides, or YiAP2 polypeptides, themselves, may find use in breeding programmes in which a DNA marker is identified which may be genetically linked to a gene encoding a FSM1-like polypeptide, or a PIF3 polypeptide, or a UROD polypeptide, or an AS-MTT polypeptide, or an EXO-1 polypeptide, or a YiAP2 polypeptide. The nucleic acids/genes, or the FSM1-like polypeptides, or PIF3-like polypeptides, or UROD polypeptides, or AS-MTT polypeptides, or EXO-1 polypeptides, or YiAP2 polypeptides, themselves may be used to define a molecular marker. This DNA or protein marker may then be used in breeding programmes to select plants having enhanced yield-related traits as defined hereinabove in the methods of the invention. Furthermore, allelic variants of a nucleic acid/gene encoding a FSM1-like polypeptide, or a PIF3 polypeptide, or a UROD polypeptide, or an AS-MTT polypeptide, or an EXO-1 polypeptide, or a YiAP2 polypeptide, may find use in marker-assisted breeding programmes. Nucleic acids encoding a FSM1-like polypeptide, or a PIF3 polypeptide, or a UROD polypeptide, or an AS-MTT polypeptide, or an EXO-1 polypeptide, or a YiAP2 polypeptide, may also be used as probes for genetically and physically mapping the genes that they are a part of, and as markers for traits linked to those genes. Such information may be useful in plant breeding in order to develop lines with desired phenotypes.

### Items

[0445] 1. FSM1-like (Fruit Sant/Myb) Polypeptides
[0446] 1. A method for enhancing yield-related traits in plants relative to control plants, comprising modulating expression in a plant of a nucleic acid encoding a FSM1-like polypeptide, wherein said FSM1-like polypeptide comprises a SANT domain (SMART accession SM0017).
[0447] 2. Method according to item 1, wherein said FSM1-like polypeptide comprises one or more of the following motifs:

(i)
(SEQ ID NO: 283)
Motif 1: W[TS][PA]K[QE]NK[LA]FE[RK]ALAVYD[KR][DE]TPDRW[HSQ]N[VI]A[RK]A,
(ii)
(SEQ ID NO: 284)
Motif 2: GGK[ST][AV][ED]EV[KR]RHYE[IL]L,
(iii)
(SEQ ID NO: 285)
Motif 3: D[VL][KF[[HF]I[ED][SN]G[RM]VPFP[NK]Y

[0448] 3. Method according to item 1 or 2, wherein said modulated expression is effected by introducing and expressing in a plant a nucleic acid encoding a FSM1-like polypeptide.
[0449] 4. Method according to any one of items 1 to 3, wherein said nucleic acid encoding a FSM1-like polypeptide encodes any one of the proteins listed in Table A1 or is a portion of such a nucleic acid, or a nucleic acid capable of hybridising with such a nucleic acid.
[0450] 5. Method according to any one of items 1 to 4, wherein said nucleic acid sequence encodes an orthologue or paralogue of any of the proteins given in Table A1.
[0451] 6. Method according to any preceding item, wherein said enhanced yield-related traits comprise increased yield, preferably increased biomass and/or increased seed yield relative to control plants.
[0452] 7. Method according to any one of items 1 to 6, wherein said enhanced yield-related traits are obtained under non-stress conditions.
[0453] 8. Method according to any one of items 3 to 7, wherein said nucleic acid is operably linked to a constitutive promoter, preferably to a GOS2 promoter, most preferably to a GOS2 promoter from rice.
[0454] 9. Method according to any one of items 1 to 8, wherein said nucleic acid encoding a FSM1-like polypeptide is of plant origin, preferably from a dicotyledonous plant, further preferably from the family Solanaceae, more preferably from the genus Lycopersicon, most preferably from Solanum lycopersicum.
[0455] 10. Plant or part thereof, including seeds, obtainable by a method according to any one of items 1 to 9, wherein said plant or part thereof comprises a recombinant nucleic acid encoding a FSM1-like polypeptide.
[0456] 11. Construct comprising:
   [0457] (i) nucleic acid encoding a FSM1-like polypeptide as defined in items 1 or 2;
   [0458] (ii) one or more control sequences capable of driving expression of the nucleic acid sequence of (a); and optionally
   [0459] (iii) a transcription termination sequence.
[0460] 12. Construct according to item 11, wherein one of said control sequences is a constitutive promoter, preferably a GOS2 promoter, most preferably a GOS2 promoter from rice.
[0461] 13. Use of a construct according to item 11 or 12 in a method for making plants having increased yield, particularly increased biomass and/or increased seed yield relative to control plants.
[0462] 14. Plant, plant part or plant cell transformed with a construct according to item 11 or 12.
[0463] 15. Method for the production of a transgenic plant having increased yield, particularly increased biomass and/or increased seed yield relative to control plants, comprising:
   [0464] (i) introducing and expressing in a plant a nucleic acid encoding a FSM1-like polypeptide as defined in item 1 or 2; and
   [0465] (ii) cultivating the plant cell under conditions promoting plant growth and development.
[0466] 16. Transgenic plant having increased yield, particularly increased biomass and/or increased seed yield, relative to control plants, resulting from modulated expression of a nucleic acid encoding a FSM1-like polypeptide as defined in item 1 or 2, or a transgenic plant cell derived from said transgenic plant.
[0467] 17. Transgenic plant according to item 10, 14 or 16, or a transgenic plant cell derived thereof, wherein said plant is a crop plant or a monocot or a cereal, such as rice, maize, wheat, barley, millet, rye, triticale, sorghum emmer, spelt, secale, einkorn, teff, milo and oats.
[0468] 18. Harvestable parts of a plant according to item 17, wherein said harvestable parts are preferably shoot biomass and/or seeds.
[0469] 19. Products derived from a plant according to item 17 and/or from harvestable parts of a plant according to item 18.
[0470] 20. Use of a nucleic acid encoding a FSM1-like polypeptide in increasing yield, particularly in increasing seed yield and/or shoot biomass in plants, relative to control plants.
   2. PIF3-like (Phytochrome Interacting Factor 3) Polypeptides
[0471] 1. A method for enhancing yield-related traits in plants relative to control plants, comprising modulating expression in a plant of a nucleic acid encoding a PIF3-like polypeptide, wherein said PIF3-like polypeptide comprises a Helix-Loop-Helix domain (PF00010).
[0472] 2. Method according to item 1, wherein said PIF3-like polypeptide comprises one or more of motifs 7 to 12 (SEQ ID NO: 358 to SEQ ID NO: 363).
[0473] 3. Method according to item 1 or 2, wherein said modulated expression is effected by introducing and expressing in a plant a nucleic acid encoding a PIF3-like polypeptide.
[0474] 4. Method according to any one of items 1 to 3, wherein said nucleic acid encoding a PIF3-like polypeptide encodes any one of the proteins listed in Table A2 or is a portion of such a nucleic acid, or a nucleic acid capable of hybridising with such a nucleic acid.
[0475] 5. Method according to any one of items 1 to 4, wherein said nucleic acid sequence encodes an orthologue or paralogue of any of the proteins given in Table A2.
[0476] 6. Method according to any preceding item, wherein said enhanced yield-related traits comprise increased early vigour and/or increased seed yield relative to control plants.
[0477] 7. Method according to any one of items 1 to 6, wherein said enhanced yield-related traits are obtained under conditions of drought stress.
[0478] 8. Method according to any one of items 3 to 7, wherein said nucleic acid is operably linked to a constitutive promoter, preferably to a GOS2 promoter, most preferably to a GOS2 promoter from rice.
[0479] 9. Method according to any one of items 1 to 8, wherein said nucleic acid encoding a PIF3-like polypeptide is of plant origin, preferably from a dicotyledonous plant, further preferably from the family Poaceae, more preferably from the genus Oryza, most preferably from Oryza sativa.
[0480] 10. Plant or part thereof, including seeds, obtainable by a method according to any one of items 1 to 10, wherein said plant or part thereof comprises a recombinant nucleic acid encoding a PIF3-like polypeptide.
[0481] 11. Construct comprising:
   [0482] (i) nucleic acid encoding a PIF3-like polypeptide as defined in items 1 or 2;
   [0483] (ii) one or more control sequences capable of driving expression of the nucleic acid sequence of (a); and optionally
   [0484] (iii) a transcription termination sequence.
[0485] 12. Construct according to item 12, wherein one of said control sequences is a constitutive promoter, preferably a GOS2 promoter, most preferably a GOS2 promoter from rice.
[0486] 13. Use of a construct according to item 12 or 13 in a method for making plants having increased yield, particularly increased biomass and/or increased seed yield relative to control plants.
[0487] 14. Plant, plant part or plant cell transformed with a construct according to item 12 or 13.
[0488] 15. Method for the production of a transgenic plant having increased yield, particularly increased biomass and/or increased seed yield relative to control plants, comprising:
   [0489] (i) introducing and expressing in a plant a nucleic acid encoding a PIF3-like polypeptide as defined in item 1 or 2; and
   [0490] (ii) cultivating the plant cell under conditions promoting plant growth and development.
[0491] 16. Transgenic plant having increased yield, particularly increased biomass and/or increased seed yield, relative to control plants, resulting from modulated expression of a nucleic acid encoding a PIF3-like polypeptide as defined in item 1 or 2, or a transgenic plant cell derived from said transgenic plant.
[0492] 17. Transgenic plant according to item 11, 15 or 17, or a transgenic plant cell derived thereof, wherein said plant is a crop plant or a monocot or a cereal, such as rice, maize, wheat, barley, millet, rye, triticale, sorghum emmer, spelt, secale, einkorn, teff, milo and oats.
[0493] 18. Harvestable parts of a plant according to item 18, wherein said harvestable parts are preferably shoot biomass and/or seeds.
[0494] 19. Products derived from a plant according to item 18 and/or from harvestable parts of a plant according to item 19.
[0495] 20. Use of a nucleic acid encoding a PIF3-like polypeptide in increasing yield, particularly in increasing seed yield and/or shoot biomass in plants, relative to control plants.
[0496] 21. An isolated nucleic acid molecule comprising any one of the following features selected from:
   [0497] (i) a nucleic acid represented by SEQ ID NO: 356;
   [0498] (ii) the complement of a nucleic acid represented by SEQ ID NO: 356;
   [0499] (iii) a nucleic acid encoding a PIF3-like polypeptide having in increasing order of preference at least 50%, 51%, 52%, 53%, 54%, 55%, 56%, 57%, 58%, 59%, 60%, 61%, 62%, 63%, 64%, 65%, 66%, 67%, 68%, 69%, 70%, 71%, 72%, 73%, 74%, 75%, 76%, 77%, 78%, 79%, 80%, 81%, 82%, 83%, 84%, 85%, 86%, 87%, 88%, 89%, 90%, 91%, 92%, 93%, 94%, 95%, 96%, 97%, 98%, or 99% sequence identity to the amino acid sequence represented by SEQ ID NO: 357, and additionally or alternatively comprising one or more motifs having in increasing order of preference less than 5, less than 4, less than 3, less than 2, or less than 1 substitutions (sequence mismatches) compared to any one or more of the motifs given in SEQ ID NO: 358 to SEQ ID NO: 363, and further preferably conferring enhanced yield-related traits relative to control plants.
   [0500] (iv) a nucleic acid molecule which hybridizes with a nucleic acid molecule of (i) to (iii) under high stringency hybridization conditions and preferably confers enhanced yield-related traits relative to control plants.
[0501] 22. An isolated polypeptide selected from:
   [0502] (i) an amino acid sequence represented by SEQ ID NO: 357;
   [0503] (ii) an amino acid sequence having, in increasing order of preference, at least 50%, 51%, 52%, 53%, 54%, 55%, 56%, 57%, 58%, 59%, 60%, 61%, 62%, 63%, 64%, 65%, 66%, 67%, 68%, 69%, 70%, 71%, 72%, 73%, 74%, 75%, 76%, 77%, 78%, 79%, 80%, 81%, 82%, 83%, 84%, 85%, 86%, 87%, 88%, 89%, 90%, 91%, 92%, 93%, 94%, 95%, 96%, 97%, 98%, or 99% sequence identity to the amino acid sequence represented by SEQ ID NO: 357, and additionally or alternatively comprising one or more motifs having in increasing order of preference less than 5, less than 4, less than 3, less than 2, or less than 1 substitutions (sequence mismatches) compared to any one or more of the motifs given in SEQ ID NO: 358 to SEQ ID NO: 363, and further preferably conferring enhanced yield-related traits relative to control plants;
   [0504] (iii) derivatives of any of the amino acid sequences given in (i) or (ii) above.

### 3. UROD (Uroporphyrinogen III Decarboxylase) Polypeptide

[0505] 1. A method for enhancing yield-related traits in plants relative to control plants, comprising modulating expression in a plant of a nucleic acid encoding a polypeptide having uroporphyrinogen III decarboxylase activity (UROD).
[0506] 2. Method according to item 1, wherein said UROD polypeptide comprises any one or more of Motifs 13 to 30.
[0507] 3. Method according to item 1 or 2, wherein said modulated expression is effected by introducing and expressing in a plant a nucleic acid encoding a UROD polypeptide.
[0508] 4. Method according to any one of items 1 to 3, wherein said nucleic acid encoding a UROD polypeptide encodes any one of the proteins listed in Table A3 or is a portion of such a nucleic acid, or a nucleic acid capable of hybridising with such a nucleic acid.
[0509] 5. Method according to any one of items 1 to 4, wherein said nucleic acid sequence encodes an orthologue or paralogue of any of the proteins given in Table A3.
[0510] 6. Method according to any preceding item, wherein said enhanced yield-related traits comprise increased seed yield relative to control plants.
[0511] 7. Method according to any one of items 1 to 6, wherein said enhanced yield-related traits are obtained under non-stress conditions.
[0512] 8. Method according to any one of items 1 to 6, wherein said enhanced yield-related traits are obtained under conditions of drought stress.
[0513] 9. Method according to any one of items 3 to 8, wherein said nucleic acid is operably linked to a constitutive promoter, preferably to a GOS2 promoter, most preferably to a GOS2 promoter from rice.
[0514] 10. Method according to any one of items 1 to 9, wherein said nucleic acid encoding a UROD polypeptide is of plant origin, family Salicaceae, more preferably from the genus Populus, most preferably from Populus trichocarpa.
[0515] 11. Plant or part thereof, including seeds, obtainable by a method according to any one of items 1 to 10, wherein said plant or part thereof comprises a recombinant nucleic acid encoding a UROD polypeptide.
[0516] 12. Construct comprising:
   [0517] (i) nucleic acid encoding a UROD polypeptide as defined in items 1 or 2;
   [0518] (ii) one or more control sequences capable of driving expression of the nucleic acid sequence of (a); and optionally
   [0519] (iii) a transcription termination sequence.
[0520] 13. Construct according to item 12, wherein one of said control sequences is a constitutive promoter, preferably a GOS2 promoter, most preferably a GOS2 promoter from rice.
[0521] 14. Use of a construct according to item 12 or 13 in a method for making plants having increased yield, particularly increased seed yield relative to control plants.
[0522] 15. Plant, plant part or plant cell transformed with a construct according to item 12 or 13.
[0523] 16. Method for the production of a transgenic plant having increased yield, particularly increased biomass and/or increased seed yield relative to control plants, comprising:
   [0524] (i) introducing and expressing in a plant a nucleic acid encoding a UROD polypeptide as defined in item 1 or 2; and
   [0525] (ii) cultivating the plant cell under conditions promoting plant growth and development.
[0526] 17. Transgenic plant having increased yield, particularly seed yield, relative to control plants, resulting from modulated expression of a nucleic acid encoding a UROD polypeptide as defined in item 1 or 2, or a transgenic plant cell derived from said transgenic plant.
[0527] 18. Transgenic plant according to item 11, 15 or 17, or a transgenic plant cell derived thereof, wherein said plant is a crop plant or a monocot or a cereal, such as rice, maize, wheat, barley, millet, rye, triticale, sorghum emmer, spelt, secale, einkorn, teff, milo and oats.
[0528] 19. Harvestable parts of a plant according to item 18, wherein said harvestable parts are preferably shoot biomass and/or seeds.
[0529] 20. Products derived from a plant according to item 18 and/or from harvestable parts of a plant according to item 19.
[0530] 21. Use of a nucleic acid encoding a UROD polypeptide in increasing yield, particularly in increasing seed yield and/or shoot biomass in plants, relative to control plants.

### 4. AS-MTT (Abiotic Stress Membrane Tethered Transcription Factor) Polypeptides

[0531] 1. A method for enhancing yield-related traits in plants relative to control plants, comprising modulating expression in a plant of a nucleic acid encoding an AS-MTT polypeptide, wherein said AS-MTT polypeptide comprises a DUF1664 domain.
[0532] 2. Method according to item 1, wherein said AS-MTT polypeptide comprises one or more of the following motifs:

(i)
(SEQ ID NO: 648)
Motif 31: G[WL][SK][FL]SD[LV]M[YF][VA]T[KR]R[NS][ML][AS][ND]AV[SA][SN][VL],
(ii)
(SEQ ID NO: 649)
Motif 32: AA[AT][VL]G[AV][VLM]GY[GC]YMWWK,
(iii)
(SEQ ID NO: 650)
Motif 33: GAG[LY]TG[ST][IV][LV][LA][KR][NE]G[KR]L

[0533] 3. Method according to item 1 or 2, wherein said modulated expression is effected by introducing and expressing in a plant a nucleic acid encoding an AS-MTT polypeptide.
[0534] 4. Method according to any one of items 1 to 3, wherein said nucleic acid encoding an AS-MTT polypeptide encodes any one of the proteins listed in Table A4 or is a portion of such a nucleic acid, or a nucleic acid capable of hybridising with such a nucleic acid.
[0535] 5. Method according to any one of items 1 to 4, wherein said nucleic acid sequence encodes an orthologue or paralogue of any of the proteins given in Table A4.
[0536] 6. Method according to any preceding item, wherein said enhanced yield-related traits comprise increased seed yield relative to control plants.
[0537] 7. Method according to any one of items 1 to 6, wherein said enhanced yield-related traits are obtained under non-stress conditions.
[0538] 8. Method according to any one of items 1 to 6, wherein said enhanced yield-related traits are obtained under conditions of drought stress, salt stress or nitrogen deficiency.
[0539] 9. Method according to any one of items 3 to 8, wherein said nucleic acid is operably linked to a constitutive promoter, preferably to a GOS2 promoter, most preferably to a GOS2 promoter from rice.
[0540] 10. Method according to any one of items 1 to 9, wherein said nucleic acid encoding an AS-MTT polypeptide is of plant origin, preferably from a dicotyledonous plant, further preferably from the genus Populus, most preferably from Populus trichocarpa.
[0541] 11. Plant or part thereof, including seeds, obtainable by a method according to any one of items 1 to 10, wherein said plant or part thereof comprises a recombinant nucleic acid encoding an AS-MTT polypeptide.
[0542] 12. Construct comprising:
   [0543] (i) nucleic acid encoding an AS-MTT polypeptide as defined in items 1 or 2;
   [0544] (ii) one or more control sequences capable of driving expression of the nucleic acid sequence of (a); and optionally
   [0545] (iii) a transcription termination sequence.
[0546] 13. Construct according to item 12, wherein one of said control sequences is a constitutive promoter, preferably a GOS2 promoter, most preferably a GOS2 promoter from rice.
[0547] 14. Use of a construct according to item 12 or 13 in a method for making plants having increased yield, particularly increased biomass and/or increased seed yield relative to control plants.
[0548] 15. Plant, plant part or plant cell transformed with a construct according to item 12 or 13.
[0549] 16. Method for the production of a transgenic plant having increased yield, particularly increased biomass and/or increased seed yield relative to control plants, comprising:
   [0550] (i) introducing and expressing in a plant a nucleic acid encoding an AS-MTT polypeptide as defined in item 1 or 2; and
   [0551] (ii) cultivating the plant cell under conditions promoting plant growth and development.
[0552] 17. Transgenic plant having increased yield, particularly increased biomass and/or increased seed yield, relative to control plants, resulting from modulated expression of a nucleic acid encoding an AS-MTT polypeptide as defined in item 1 or 2, or a transgenic plant cell derived from said transgenic plant.
[0553] 18. Transgenic plant according to item 11, 15 or 17, or a transgenic plant cell derived thereof, wherein said plant is a crop plant or a monocot or a cereal, such as rice, maize, wheat, barley, millet, rye, triticale, sorghum emmer, spelt, secale, einkorn, teff, milo and oats.
[0554] 19. Harvestable parts of a plant according to item 18, wherein said harvestable parts are preferably shoot biomass and/or seeds.
[0555] 20. Products derived from a plant according to item 18 and/or from harvestable parts of a plant according to item 19.
[0556] 21. Use of a nucleic acid encoding an AS-MTT polypeptide in increasing yield, particularly in increasing seed yield and/or shoot biomass in plants, relative to control plants.

### 5. EXO-1 Polypeptide

[0557] 1. A method for enhancing yield-related traits in plants relative to control plants, comprising modulating expression in a plant of a nucleic acid encoding an EXO-1 polypeptide, wherein said EXO-1 polypeptide comprises at least one of the following domains: XPG_N with accession number PF00752, XPG_{—}1 with accession number PF00867 or EXONUCLEASE 1 domain with accession number PTHR11081:SF8.
[0558] 2. Method, according to item 1, wherein said EXO-1 polypeptide comprises one or more of the following motifs:

(SEQ ID NO: 664)
Motif 40: G[QKC][RT]VA[VI]D[TA]YSWLH[KR][GA]A[YL]SC[SA]RELC[KEL]GLPT,
(SEQ ID NO: 665)
Motif 41: Y[CF]M[HK]RVN[LM]L[RL]H[YH][GK][VI]KP[IV][LV]VFDGGRLPMK[AS][DE]
[QTE]ENKR[AR]R[SK]RKENL[EA]RA[KR]E[HL][ELW],
(SEQ ID NO: 666)
Motif 42: V[DQA]A[VI]ITEDSDL[IL][AP][FY]GC[PK]R[IV][IF]FK[ML]D[KR][FYN]GQG

[0559] 3. Method, according to item 1 or 2, wherein said modulated expression is effected by introducing and expressing in a plant a nucleic acid encoding an EXO-1 polypeptide.
[0560] 4. Method, according to any one of items 1 to 3, wherein said nucleic acid encoding an EXO-1 polypeptide encodes any one of the proteins listed in Table A5 or is a portion of such a nucleic acid, or a nucleic acid capable of hybridising with such a nucleic acid.
[0561] 5. Method, according to any one of items 1 to 4, wherein said nucleic acid sequence encodes an orthologue or paralogue of any of the proteins given in Table A5.
[0562] 6. Method, according to any preceding item, wherein said enhanced yield-related traits comprise increased (yield—early vigour), preferably increased biomass and/or increased seed yield relative to control plants.
[0563] 7. Method, according to any one of items 1 to 6, wherein said enhanced yield-related traits are obtained under non-stress conditions.
[0564] 8. Method, according to any one of items 1 to 6, wherein said enhanced yield-related traits are obtained under conditions of drought stress, salt stress or nitrogen deficiency.
[0565] 9. Method, according to any one of items 3 to 8, wherein said nucleic acid is operably linked to a constitutive promoter, preferably to a GOS2 promoter, most preferably to a GOS2 promoter from rice.
[0566] 10. Method, according to any one of items 3 to 8, wherein said nucleic acid is operably linked to a shoot-specific promoter, preferably to a beta expansin promoter, most preferably to an EXPB9 promoter from rice
[0567] 11. Method, according to any one of items 1 to 10, wherein said nucleic acid encoding an EXO-1 polypeptide is of plant origin, preferably from a dicotyledonous plant, further preferably from the family Salicaceae, more preferably from the genus Populus, most preferably from Populus trichocarpa.
[0568] 12. Plant or part thereof, including seeds, obtainable by a method according to any one of items 1 to 11, wherein said plant or part thereof comprises a recombinant nucleic acid encoding an EXO-1 polypeptide.
[0569] 13. Construct comprising:
   [0570] (i) nucleic acid encoding an EXO-1 polypeptide as defined in items 1 or 2;
   [0571] (ii) one or more control sequences capable of driving expression of the nucleic acid sequence of (a); and optionally
   [0572] (iii) a transcription termination sequence.
[0573] 14. Construct according to item 13, wherein one of said control sequences is a constitutive promoter, preferably a GOS2 promoter, most preferably a GOS2 promoter from rice.
[0574] 15. Construct, according to item 13, wherein one of said control sequences is a shoot-specific promoter, preferably a beta expansin promoter, most preferably an EXPB9 promoter from rice 16. Use of a construct, according to any of the items 13 to 15, in a method for making plants having increased yield, particularly increased biomass and/or increased seed yield relative to control plants.
[0575] 17. Plant, plant part or plant cell transformed with a construct according to any of the items 13 to 15.
[0576] 18. Method for the production of a transgenic plant having increased yield, particularly increased biomass and/or increased seed yield relative to control plants, comprising:
   [0577] (i) introducing and expressing in a plant a nucleic acid encoding an EXO-1 polypeptide as defined in item 1 or 2; and
   [0578] (ii) cultivating the plant cell under conditions promoting plant growth and development.
[0579] 19. Transgenic plant having increased yield, particularly increased biomass and/or increased seed yield, relative to control plants, resulting from modulated expression of a nucleic acid encoding an EXO-1 polypeptide as defined in item 1 or 2, or a transgenic plant cell derived from said transgenic plant.
[0580] 20. Transgenic plant, according to item 12, 17 or 19, or a transgenic plant cell derived thereof, wherein said plant is a crop plant or a monocot or a cereal, such as rice, maize, wheat, barley, millet, rye, triticale, sorghum emmer, spelt, secale, einkorn, teff, milo and oats.
[0581] 21. Harvestable parts of a plant according to item 20, wherein said harvestable parts are preferably shoot biomass and/or seeds.
[0582] 22. Products derived from a plant, according to item 20 and/or from harvestable parts of a plant according to item 21.
[0583] 23. Use of a nucleic acid encoding an EXO-1 polypeptide in increasing yield, particularly in increasing seed yield and/or shoot biomass in plants, relative to control plants.

### 6. YiAP2 Polypeptides

[0584] 1. A method for enhancing yield-related traits in plants relative to control plants, comprising modulating expression in a plant of a nucleic acid encoding a YiAP2 polypeptide or a portion thereof.
[0585] 2. Method according to item 1, wherein said YiAP2 polypeptide comprises at least two AP2 domains and one or more motifs having at least 50%, 51%, 52%, 53%, 54%, 55%, 56%, 57%, 58%, 59%, 60%, 61%, 62%, 63%, 64%, 65%, 66%, 67%, 68%, 69%, 70%, 71%, 72%, 73%, 74%, 75%, 76%, 77%, 78%, 79%, 80%, 81%, 82%, 83%, 84%, 85%, 86%, 87%, 88%, 89%, 90%, 91%, 92%, 93%, 94%, 95%, 96%, 97%, 98%, 99% or 100% sequence identity to any one of the following motifs:
   [0586] (i) Motif 43 as represented by SEQ ID NO: 890;
   [0587] (ii) Motif 44 as represented by SEQ ID NO: 891;
   [0588] (iii) Motif 45 as represented by SEQ ID NO: 892;
   [0589] (iv) Motif 46 as represented by SEQ ID NO: 893;
   [0590] (v) Motif 47 as represented by SEQ ID NO: 894;
   [0591] (vi) Motif 48 as represented by SEQ ID NO: 895.
[0592] 3. Method according to item 1 or 2, wherein said modulated expression is effected by introducing and expressing in a plant a nucleic acid encoding a YiAP2 polypeptide.
[0593] 4. Method according to any one of items 1 to 3, wherein said nucleic acid encoding a YiAP2 polypeptide encodes any one of the proteins listed in Table A6 or is a portion of such a nucleic acid, or a nucleic acid capable of hybridising with such a nucleic acid.
[0594] 5. Method according to any one of items 1 to 4, wherein said nucleic acid sequence encodes an orthologue or paralogue of any of the proteins given in Table A6.
[0595] 6. Method according to any preceding item, wherein said enhanced yield-related traits comprise increased yield preferably increased seed yield relative to control plants.
[0596] 7. Method according to any one of items 1 to 6, wherein said enhanced yield-related traits are obtained under non-stress conditions.
[0597] 8. Method according to any one of items 1 to 6, wherein said enhanced yield-related traits are obtained under conditions of drought stress, salt stress or nitrogen deficiency.
[0598] 9. Method according to any one of items 3 to 8, wherein said nucleic acid is operably linked to a constitutive promoter, preferably to a GOS2 promoter, most preferably to a GOS2 promoter from rice.
[0599] 10. Method according to any one of items 1 to 9, wherein said nucleic acid encoding a YiAP2 polypeptide is of plant origin, preferably from a dicotyledonous plant, more preferably from the genus Medicago, most preferably from Medicago truncatula.
[0600] 11. Plant or part thereof, including seeds, obtainable by a method according to any one of items 1 to 10, wherein said plant or part thereof comprises a recombinant nucleic acid encoding a YiAP2 polypeptide.
[0601] 12. Construct comprising:
   [0602] (i) nucleic acid encoding a YiAP2 polypeptide as defined in items 1 or 2;
   [0603] (ii) one or more control sequences capable of driving expression of the nucleic acid sequence of (a); and optionally
   [0604] (iii) a transcription termination sequence.
[0605] 13. Construct according to item 12, wherein one of said control sequences is a constitutive promoter, preferably a GOS2 promoter, most preferably a GOS2 promoter from rice.
[0606] 14. Use of a construct according to item 12 or 13 in a method for making plants having increased yield, particularly increased biomass and/or increased seed yield relative to control plants.
[0607] 15. Plant, plant part or plant cell transformed with a construct according to item 12 or 13.
[0608] 16. Method for the production of a transgenic plant having increased yield, particularly increased biomass and/or increased seed yield relative to control plants, comprising:
   [0609] (i) introducing and expressing in a plant a nucleic acid encoding a YiAP2 polypeptide as defined in item 1 or 2; and
   [0610] (ii) cultivating the plant cell under conditions promoting plant growth and development.
[0611] 17. Transgenic plant having increased yield, particularly increased biomass and/or increased seed yield, relative to control plants, resulting from modulated expression of a nucleic acid encoding a YiAP2 polypeptide as defined in item 1 or 2, or a transgenic plant cell derived from said transgenic plant.
[0612] 18. Transgenic plant according to item 11, 15 or 17, or a transgenic plant cell derived thereof, wherein said plant is a crop plant or a monocot or a cereal, such as rice, maize, wheat, barley, millet, rye, triticale, sorghum emmer, spelt, secale, einkorn, teff, milo and oats.
[0613] 19. Harvestable parts of a plant according to item 18, wherein said harvestable parts are preferably shoot biomass and/or seeds.
[0614] 20. Products derived from a plant according to item 18 and/or from harvestable parts of a plant according to item 19.
[0615] 21. Use of a nucleic acid encoding a YiAP2 polypeptide in increasing yield, particularly in increasing seed yield and/or shoot biomass in plants, relative to control plants.

### DESCRIPTION OF FIGURES

[0616] The present invention will now be described with reference to the following figures in which:

[0617] FIG. 1 represents the domain structure of SEQ ID NO: 2 with the conserved motifs underlined and numbered. The MYB/SANT domain (PF00249) is indicated in italics and stretches from Ser11 to Leu60.

[0618] FIG. 2 represents a multiple alignment of various FSM1-like polypeptides. The asterisks indicate identical amino acids among the various protein sequences, colons represent highly conserved amino acid substitutions, and the dots represent less conserved amino acid substitution; on other positions there is no sequence conservation. These alignments can be used for defining further motifs, when using conserved amino acids.

[0619] FIG. 3 shows phylogenetic tree of FSM1-like polypeptides, constructed as described in Example 2. The SANT/MYB Glade is in blue and comprises all the FSM1-like proteins given in the sequence listing, the other clades represent other MYB proteins.

[0620] FIG. 4 represents the binary vector used for increased expression in Oryza sativa of a FSM1-like-encoding nucleic acid under the control of a rice GOS2 promoter (pGOS2)

[0621] FIG. 5 represents the consensus sequence of the SANT domain as present in the SMART database. The different symbols in the motifs are clarified in the table where for each class of amino acids the respective residues are given with the one-letter code.

[0622] FIG. 6 represents the domain structure of SEQ ID NO: 293 with the HLH domain (PF00010) in bold and the conserved motifs underlined and numbered.

[0623] FIG. 7 represents a multiple alignment of various PIF3-like polypeptides. The asterisks indicate identical amino acids among the various protein sequences, colons represent highly conserved amino acid substitutions, and the dots represent less conserved amino acid substitution; on other positions there is no sequence conservation. These alignments can be used for defining further motifs, when using conserved amino acids.

[0624] FIG. 8 shows phylogenetic tree of PIF3-like polypeptides.

[0625] FIG. 9 represents the binary vector used for increased expression in Oryza sativa of a PIF3-like-encoding nucleic acid under the control of a rice GOS2 promoter (pGOS2)

[0626] FIG. 10 is an alignment of the polypeptide sequence of SEQ ID NO: 368 with the Arabidopsis thaliana HEME1 and 2 sequences (At3g14930 and At2g40490), and human UROD proteins using ClustalW program. SEQ ID NO: 368 shares 75% amino acid identity with the Arabidopsis HEME1 sequence and 48% amino acid identity with the Arabidopsis HEME2 sequence. The alignment shows highly conserved residues even with the human sequence.

[0627] FIG. 11 shows the porphyrin and chlorophyll pathway and the involvement of UROD as a precursor in chlorophyll biosysnthesis.

[0628] FIG. 12 shows a phylogenetic tree of UROD polypeptides. The proteins were aligned using MAFT (Katoh and Toh (2008). Briefings in Bioinformatics 9:286-298). A neighbour-joining tree was calculated using QuickTree1.1 (Houwe et al. (2002). Bioinformatics 18(11):1546-7). A dendrogram was drawn using Dendroscope2.0.1 (Hudson et al. (2007). Bioinformatics 8(1):460). At e=1e-59, both Arabidopsis URO genes (HEME1 and HEME2) were recovered. The tree was generated using representative members of each cluster. Two groups were clearly identified according to their species of origin: the Non-Photosynthetic URO-D (1) and the Photosynthetic URO-D comprising the HEM1 cluster (2), the HEM2 cluster (3), the CYANO cluster (4) and others (5). P. trichocarpa URO-D of SEQ ID NO: 368 is indicated as P.trichocarpa_URO_D_{—}Populus trichocarpa_SPT.

[0629] FIG. 13 shows a further phylogenetic tree of UROD polypeptides. The proteins were aligned using MAFT (Katoh and Toh (2008). Briefings in Bioinformatics 9:286-298.). A neighbour-joining tree was calculated using QuickTree1.1 (Houwe et al. (2002). Bioinformatics 18(11):1546-7). A circular dendrogram was drawn using Dendroscope2.0.1 (Hudson et al. (2007). Bioinformatics 8(1):460). At e=1e-59, both Arabidopsis URO genes (HEME1 and HEME2) were recovered. The tree was generated using representative members of each cluster. Two groups were clearly identified according to their species of origin: the Non-Photosynthetic URO-D (1) and the Photosynthetic URO-D comprising the HEM1 cluster (2), the HEM2 cluster (3), the CYANO cluster (4) and others (5). P. trichocarpa URO-D of SEQ ID NO: 368 is indicated as P.trichocarpa_URO_D_{—}Populus trichocarpa_SPT. SPT=Streptophyta, CHL=chlorphyta, STR=Stramenopile, BAC=Cyanobacteria.

[0630] FIG. 14 represents the binary vector used for increased expression in Oryza sativa of a UROD-encoding nucleic acid under the control of a rice GOS2 promoter (pGOS2).

[0631] FIG. 15 represents a multiple alignment of various AS-MTT polypeptides. The asterisks indicate identical amino acids among the various protein sequences, colons represent highly conserved amino acid substitutions, and the dots represent less conserved amino acid substitution; on other positions there is no sequence conservation. These alignments can be used for defining further motifs, when using conserved amino acids.

[0632] FIG. 16 shows phylogenetic tree of AS-MTT polypeptides. Clades A and B are indicated.

[0633] FIG. 17 represents the binary vector used for increased expression in Oryza sativa of an AS-MTT-encoding nucleic acid under the control of a rice GOS2 promoter (pGOS2).

[0634] FIG. 18 represents the alignment of XPG-N and XPG-I domains between EXO1 from Oryza sativa (OsEXO1) and other EXO1 proteins. The accession numbers for each protein sequence; OsEXO1 (BAD60834), AtEXO1a (At1G18090), AtEXO1b (At1g29630), HEX1 (AAC32259), MmEXO1 (NP_{—}036142), DmEXO1 (CAA61431), ScEXO1 (NP_{—}014676), SpEXO1 (NP_{—}596050).

[0635] FIG. 19 shows phylogenetic tree of EXO-1 polypeptides, where EXO-1 from P. trichocarpa (scaff_XI.493_III) is marked with a shadow in the Glade of Class III. See the sequence listing for species abbreviations.

[0636] FIG. 20 represents the binary vector used for increased expression in Oryza sativa of an EXO-1-encoding nucleic acid under the control of a rice GOS2 promoter (pGOS2).

[0637] FIG. 21 represents the binary vector used for increased expression in Oryza sativa of an EXO-1-encoding nucleic acid under the control of a rice beta expansin promoter (EXPB9).

[0638] FIG. 22 represents a multiple alignment of various YiAP2 polypeptides. Highly conserved amino acids are indicated in the consensus sequences. Empty spaces in the consensus sequence represent any amino acid. These alignments can be used for defining further motifs, when using conserved amino acids.

[0639] FIG. 23 represents the binary vector used for increased expression in Oryza sativa of a YiAP2-encoding nucleic acid under the control of a rice GOS2 promoter (pGOS2).

### EXAMPLES

[0640] The present invention will now be described with reference to the following examples, which are by way of illustration alone. The following examples are not intended to completely define or otherwise limit the scope of the invention.

[0641] DNA manipulation: unless otherwise stated, recombinant DNA techniques are performed according to standard protocols described in (Sambrook (2001) Molecular Cloning: a laboratory manual, 3rd Edition Cold Spring Harbor Laboratory Press, CSH, New York) or in Volumes 1 and 2 of Ausubel et al. (1994), Current Protocols in Molecular Biology, Current Protocols. Standard materials and methods for plant molecular work are described in Plant Molecular Biology Labfax (1993) by R. D. D. Croy, published by BIOS Scientific Publications Ltd (UK) and Blackwell Scientific Publications (UK).

### Example 1

### Identification of Sequences Related to the Nucleic Acid Sequence Used in the Methods of the Invention

[0642] 1. FSM1-like (Fruit Sant/Myb) Polypeptides

[0643] Sequences (full length cDNA, ESTs or genomic) related to SEQ ID NO: 1 and SEQ ID NO: 2 were identified amongst those maintained in the Entrez Nucleotides database at the National Center for Biotechnology Information (NCBI) using database sequence search tools, such as the Basic Local Alignment Tool (BLAST) (Altschul et al. (1990) J. Mol. Biol. 215:403-410; and Altschul et al. (1997) Nucleic Acids Res. 25:3389-3402). The program is used to find regions of local similarity between sequences by comparing nucleic acid or polypeptide sequences to sequence databases and by calculating the statistical significance of matches. For example, the polypeptide encoded by the nucleic acid of SEQ ID NO: 1 was used for the TBLASTN algorithm, with default settings and the filter to ignore low complexity sequences set off. The output of the analysis was viewed by pairwise comparison, and ranked according to the probability score (E-value), where the score reflect the probability that a particular alignment occurs by chance (the lower the E-value, the more significant the hit). In addition to E-values, comparisons were also scored by percentage identity. Percentage identity refers to the number of identical nucleotides (or amino acids) between the two compared nucleic acid (or polypeptide) sequences over a particular length. In some instances, the default parameters may be adjusted to modify the stringency of the search. For example the E-value may be increased to show less stringent matches. This way, short nearly exact matches may be identified.

[0644] Table A1 provides a list of nucleic acid sequences related to SEQ ID NO: 1 and SEQ ID NO: 2.

TABLE A1
Examples of FSM1-like nucleic acids and polypeptides:

| | Nucleic acid | Polypeptide |
|---|---|---|
| Name | SEQ ID NO: | SEQ ID NO: |
| S. lycopersicum_TA46686_4081#1 | 1 | 2 |
| A. majus_AJ793240#1 | 3 | 4 |
| A. majus_TA4522_4151#1 | 5 | 6 |
| A. thaliana_AT1G19510.1#1 | 7 | 8 |
| A. thaliana_AT1G75250.2#1 | 9 | 10 |
| A. thaliana_AT2G21650.1#1 | 11 | 12 |
| At4g36570_I-box-binding-like_NA | 13 | 14 |
| A. thaliana_AT4G39250.1#1 | 15 | 16 |
| B. napus_BN06MC20309_46582753@20242#1 | 17 | 18 |
| B. napus_EE472702#1 | 19 | 20 |
| B. napus_EL589700#1 | 21 | 22 |
| B. rapa_L38243#1 | 23 | 24 |
| C. annuum_BM060888#1 | 25 | 26 |
| C. clementina_CX295458#1 | 27 | 28 |
| C. intybus_EH706852#1 | 29 | 30 |
| C. maculosa_EH726540#1 | 31 | 32 |
| C. sinensis_TA19011_2711#1 | 33 | 34 |
| E. grandis_CD669972#1 | 35 | 36 |
| E. gunnii_CT980385#1 | 37 | 38 |
| E. gunnii_CT985658#1 | 39 | 40 |
| E. tereticornis_CD668687#1 | 41 | 42 |
| F. arundinacea_DT700402#1 | 43 | 44 |
| F. vesca_EX665737#1 | 45 | 46 |
| G. hirsutum_DR461014#1 | 47 | 48 |
| G. hirsutum_DW476156#1 | 49 | 50 |
| G. hirsutum_DW497247#1 | 51 | 52 |
| G. hirsutum_DW503354#1 | 53 | 54 |
| G. hirsutum_TA26706_3635#1 | 55 | 56 |
| G. hirsutum_TA31277_3635#1 | 57 | 58 |
| G. hirsutum_TA36120_3635#1 | 59 | 60 |
| G. hirsutum_TA37973_3635#1 | 61 | 62 |
| G. hirsutum_TA43581_3635#1 | 63 | 64 |
| G. max_CA852793#1 | 65 | 66 |
| G. max_Glyma01g38250.1#1 | 67 | 68 |
| G. max_Glyma02g06230.1#1 | 69 | 70 |
| G. max_Glyma02g06240.1#1 | 71 | 72 |
| G. max_Glyma02g18210.1#1 | 73 | 74 |
| G. max_Glyma02g41670.1#1 | 75 | 76 |
| G. max_Glyma03g28050.1#1 | 77 | 78 |
| G. max_Glyma04g16390.1#1 | 79 | 80 |
| G. max_Glyma06g03490.1#1 | 81 | 82 |
| G. max_Glyma06g46590.1#1 | 83 | 84 |
| G. max_Glyma12g04680.1#1 | 85 | 86 |
| G. max_Glyma14g08090.3#1 | 87 | 88 |
| G. max_Glyma16g25250.1#1 | 89 | 90 |
| G. max_Glyma18g04120.1#1 | 91 | 92 |
| H. argophyllus_EE611072#1 | 93 | 94 |
| H. exilis_EE652824#1 | 95 | 96 |
| H. vulgare_BQ762901#1 | 97 | 98 |
| H. vulgare_CK125210#1 | 99 | 100 |
| I. batatas_EE882249#1 | 101 | 102 |
| I. nil_CJ754125#1 | 103 | 104 |
| L. perennis_DW074785#1 | 105 | 106 |
| L. sativa_TA7946_4236#1 | 107 | 108 |
| L. serriola_DW122081#1 | 109 | 110 |
| L. virosa_TA3253_75947#1 | 111 | 112 |
| M. acuminata_ES435134#1 | 113 | 114 |
| M. domestica_DR994824#1 | 115 | 116 |
| M. domestica_TA45680_3750#1 | 117 | 118 |
| M. esculenta_CK645030#1 | 119 | 120 |
| M. guttatus_DV207881#1 | 121 | 122 |
| M. truncatula_AC135566_10.5#1 | 123 | 124 |
| M. truncatula_AC157502_5.5#1 | 125 | 126 |
| M. truncatula_AC162787_11.4#1 | 127 | 128 |
| M. truncatula_AC162787_14.4#1 | 129 | 130 |
| M. truncatula_CT033768_12.4#1 | 131 | 132 |
| M. truncatula_CX518743#1 | 133 | 134 |
| N. benthamiana_EH366122#1 | 135 | 136 |
| O. minuta_TA1082_63629#1 | 137 | 138 |
| O. sativa_LOC_Os01g44370.1#1 | 139 | 140 |
| O. sativa_LOC_Os01g44390.1#1 | 141 | 142 |
| O. sativa_LOC_Os01g47370.1#1 | 143 | 144 |
| O. sativa_LOC_Os02g47744.1#1 | 145 | 146 |
| O. sativa_LOC_Os05g49240.1#1 | 147 | 148 |
| O. sativa_LOC_Os05g50350.1#1 | 149 | 150 |
| O. sativa_LOC_Os06g28630.1#1 | 151 | 152 |
| O. sativa_LOC_Os07g26150.1#1 | 153 | 154 |
| O. sativa_LOC_Os12g33950.1#1 | 155 | 156 |
| O. sativa_Os05g0579600#1 | 157 | 158 |
| P. americana_CO997831#1 | 159 | 160 |
| P. americana_DT578382#1 | 161 | 162 |
| P. coccineus_CA897021#1 | 163 | 164 |
| P. euphratica_AJ768009#1 | 165 | 166 |
| P. euphratica_AJ768184#1 | 167 | 168 |
| P. euphratica_AJ768574#1 | 169 | 170 |
| P. glauca_DR559298#1 | 171 | 172 |
| P. pinaster_BX682614#1 | 173 | 174 |
| P. taeda_TA26731_3352#1 | 175 | 176 |
| P. tremula_BU823356#1 | 177 | 178 |
| P. tremula_TA8294_113636#1 | 179 | 180 |
| P. trichocarpa_553339#1 | 181 | 182 |
| P. trichocarpa_557252#1 | 183 | 184 |
| P. trichocarpa_scaff_57.171#1 | 185 | 186 |
| P. trichocarpa_scaff_IV.1184#1 | 187 | 188 |
| P. trichocarpa_scaff_IX.506#1 | 189 | 190 |
| P. trichocarpa_scaff_V.1348#1 | 191 | 192 |
| P. trichocarpa_TA23239_3694#1 | 193 | 194 |
| S. bicolor_Sb01g040910.1#1 | 195 | 196 |
| S. bicolor_Sb03g028950.1#1 | 197 | 198 |
| S. bicolor_Sb03g028960.1#1 | 199 | 200 |
| S. bicolor_Sb03g030330.1#1 | 201 | 202 |
| S. bicolor_Sb04g030510.1#1 | 203 | 204 |
| S. bicolor_Sb09g028790.1#1 | 205 | 206 |
| S. bicolor_Sb09g029560.1#1 | 207 | 208 |
| S. henryi_TA107_13258#1 | 209 | 210 |
| S. indicum_BU668323#1 | 211 | 212 |
| S. officinarum_CA111191#1 | 213 | 214 |
| S. officinarum_CA283940#1 | 215 | 216 |
| S. officinarum_TA43900_4547#1 | 217 | 218 |
| S. officinarum_TA47846_4547#1 | 219 | 220 |
| S. tuberosum_BI433702#1 | 221 | 222 |
| S. tuberosum_CV500497#1 | 223 | 224 |
| S. tuberosum_CV504810#1 | 225 | 226 |
| T. aestivum_BE427243#1 | 227 | 228 |
| T. aestivum_BM259034#1 | 229 | 230 |
| T. aestivum_CA623533#1 | 231 | 232 |
| T. aestivum_CV775992#1 | 233 | 234 |
| T. aestivum_TA110455_4565#1 | 235 | 236 |
| T. aestivum_TA95415_4565#1 | 237 | 238 |
| T. erecta_SIN_31b-CS_SCR20-B14.b1--------@5804#1 | 239 | 240 |
| T. pratense_BB920325#1 | 241 | 242 |
| T. salsuginea_DN773374#1 | 243 | 244 |
| V. vinifera_CA812415#1 | 245 | 246 |
| V. vinifera_CB345061#1 | 247 | 248 |
| V. vinifera_CB972578#1 | 249 | 250 |
| V. vinifera_EE072107#1 | 251 | 252 |
| V. vinifera_GSVIVT00014602001#1 | 253 | 254 |
| V. vinifera_GSVIVT00028247001#1 | 255 | 256 |
| V. vinifera_GSVIVT00036374001#1 | 257 | 258 |
| Z. mays_c58977309gm030403@3901#1 | 259 | 260 |
| Z. mays_c68506706gm030403@11442#1 | 261 | 262 |
| Z. mays_DR787399#1 | 263 | 264 |
| Z. mays_s58275634gm030403@34722#1 | 265 | 266 |
| Z. mays_TA203683_4577#1 | 267 | 268 |
| Z. mays_TA206461_4577#1 | 269 | 270 |
| Z. mays_TA208256_4577#1 | 271 | 272 |
| Z. mays_TA210755_4577#1 | 273 | 274 |
| Z. mays_TA219702_4577#1 | 275 | 276 |
| Z. mays_ZM07MSbpsHQ_57388861.r01@38768#1 | 277 | 278 |
| Z. officinale_DY348802#1 | 279 | 280 |
| Z. officinale_DY369792#1 | 281 | 282 |

[0645] Sequences have been tentatively assembled and publicly disclosed by research institutions, such as The Institute for Genomic Research (TIGR; beginning with TA). The Eukaryotic Gene Orthologs (EGO) database may be used to identify such related sequences, either by keyword search or by using the BLAST algorithm with the nucleic acid sequence or polypeptide sequence of interest. Special nucleic acid sequence databases have been created for particular organisms, such as by the Joint Genome Institute. Furthermore, access to proprietary databases, has allowed the identification of novel nucleic acid and polypeptide sequences.

2. PIF3-like (Phytochrome Interacting Factor 3) Polypeptides

[0646] Sequences (full length cDNA, ESTs or genomic) related to SEQ ID NO: 292 and SEQ ID NO: 293 were identified amongst those maintained in the Entrez Nucleotides database at the National Center for Biotechnology Information (NCBI) using database sequence search tools, such as the Basic Local Alignment Tool (BLAST) (Altschul et al. (1990) J. Mol. Biol. 215:403-410; and Altschul et al. (1997) Nucleic Acids Res. 25:3389-3402). The program is used to find regions of local similarity between sequences by comparing nucleic acid or polypeptide sequences to sequence databases and by calculating the statistical significance of matches. For example, the polypeptide encoded by the nucleic acid of SEQ ID NO: 292 was used for the TBLASTN algorithm, with default settings and the filter to ignore low complexity sequences set off. The output of the analysis was viewed by pairwise comparison, and ranked according to the probability score (E-value), where the score reflect the probability that a particular alignment occurs by chance (the lower the E-value, the more significant the hit). In addition to E-values, comparisons were also scored by percentage identity. Percentage identity refers to the number of identical nucleotides (or amino acids) between the two compared nucleic acid (or polypeptide) sequences over a particular length. In some instances, the default parameters may be adjusted to modify the stringency of the search. For example the E-value may be increased to show less stringent matches. This way, short nearly exact matches may be identified.

[0647] Table A2 provides a list of nucleic acid sequences related to SEQ ID NO: 292 and SEQ ID NO: 293.

TABLE A2
Examples of PIF3-like nucleic acids and polypeptides:

| | Nucleic | |
|---|---|---|
| | acid | |
| | SEQ | Polypeptide |
| Name | ID NO: | SEQ ID NO: |
| O_sativa_LOC_Os12g41650_2 | 292 | 293 |
| (SEQ ID NO: 292) | | |
| A_thaliana_AT2G20180_2_1 | 294 | 295 |
| A_thaliana_AT2G43010_1_1 | 296 | 297 |
| A_thaliana_AT3G59060_1_1 | 298 | 299 |
| G_max_Glyma02g45150_1_1 | 300 | 301 |
| G_max_Glyma03g32740_1_1 | 302 | 303 |
| G_max_Glyma08g41620_1_1 | 304 | 305 |
| G_max_Glyma10g04890_1_1 | 306 | 307 |
| G_max_Glyma10g28290_1_1 | 308 | 309 |
| G_max_Glyma13g19250_1_1 | 310 | 311 |
| G_max_Glyma18g14530_1_1 | 312 | 313 |
| M_truncatula_AC161749_19_5_1 | 314 | 315 |
| M_truncatula_TC130203_1 | 316 | 317 |
| O_sativa_LOC_Os03g43810_1_1 | 318 | 319 |
| O_sativa_LOC_Os03g56950_2 | 320 | 321 |
| O_sativa_LOC_Os03g56950_5_1 | 322 | 323 |
| O_sativa_LOC_Os03g56950_6_1 | 324 | 325 |
| O_sativa_LOC_Os03g56950_7_1 | 326 | 327 |
| O_sativa_LOC_Os07g05010_1_1 | 328 | 329 |
| A_thaliana_AT1G09530_1_1 | 330 | 331 |
| O_sativa_Os03g0782500_1 | 332 | 333 |
| O_sativa_Os07g0143200_1 | 334 | 335 |
| P_trichocarpa_581594_1 | 336 | 337 |
| P_trichocarpa_756351_1 | 338 | 339 |
| P_trichocarpa_scaff_131_21_1 | 340 | 341 |
| P_trichocarpa_scaff_II_2575_1 | 342 | 343 |
| P_trichocarpa_scaff_V_1141_1 | 344 | 345 |
| P_trichocarpa_scaff_XIII_13_1 | 346 | 347 |
| P_trichocarpa_TC100024_1 | 348 | 349 |
| S_lycopersicum_TC192046_1 | 350 | 351 |
| Oryza Sativa TMCDS_14571 | 352 | 353 |
| Populus trichocarpa TMCDS_30166 | 354 | 355 |
| Z_mays_ZM07MC05422_62035389_5410_1 | 356 | 357 |

[0648] Sequences have been tentatively assembled and publicly disclosed by research institutions, such as The Institute for Genomic Research (TIGR; beginning with TA). The Eukaryotic Gene Orthologs (EGO) database may be used to identify such related sequences, either by keyword search or by using the BLAST algorithm with the nucleic acid sequence or polypeptide sequence of interest. Special nucleic acid sequence databases have been created for particular organisms, such as by the Joint Genome Institute. Furthermore, access to proprietary databases, has allowed the identification of novel nucleic acid and polypeptide sequences.

### 3. UROD (Uroporphyrinogen III Decarboxylase) Polypeptide

[0649] Sequences (full length cDNA, ESTs or genomic) related to SEQ ID NO: 367 and SEQ ID NO: 368 were identified amongst those maintained in the Entrez Nucleotides database at the National Center for Biotechnology Information (NCBI) using database sequence search tools, such as the Basic Local Alignment Tool (BLAST) (Altschul et al. (1990) J. Mol. Biol. 215:403-410; and Altschul et al. (1997) Nucleic Acids Res. 25:3389-3402). The program is used to find regions of local similarity between sequences by comparing nucleic acid or polypeptide sequences to sequence databases and by calculating the statistical significance of matches. For example, the polypeptide encoded by the nucleic acid of SEQ ID NO: 367 was used for the TBLASTN algorithm, with default settings and the filter to ignore low complexity sequences set off. The output of the analysis was viewed by pairwise comparison, and ranked according to the probability score (E-value), where the score reflect the probability that a particular alignment occurs by chance (the lower the E-value, the more significant the hit). In addition to E-values, comparisons were also scored by percentage identity. Percentage identity refers to the number of identical nucleotides (or amino acids) between the two compared nucleic acid (or polypeptide) sequences over a particular length. In some instances, the default parameters may be adjusted to modify the stringency of the search. For example the E-value may be increased to show less stringent matches. This way, short nearly exact matches may be identified.

[0650] Table A3 provides a list of nucleic acid sequences related to SEQ ID NO: 367 and SEQ ID NO: 368.

TABLE A3
Examples of UROD nucleic acids and polypeptides:

| | Nucleic | Poly- |
|---|---|---|
| | acid | peptide |
| | SEQ | SEQ |
| Name | ID NO: | ID NO: |
| P. trichocarpa | 367 | 368 |
| A. anophagefferens_30614#1 | 369 | 370 |
| A. thaliana_AT2G40490.1#1 | 371 | 372 |
| A. thaliana_AT3G14930.1#1 | 373 | 374 |
| A. thaliana_AT3G14930.2#1 | 375 | 376 |
| Aquilegia_sp_TC24226#1 | 377 | 378 |
| Aquilegia_sp_TC24505#1 | 379 | 380 |
| B. napus_TC68105#1 | 381 | 382 |
| B. napus_TC76241#1 | 383 | 384 |
| B. napus_TC77092#1 | 385 | 386 |
| C. reinhardtii_132194#1 | 387 | 388 |
| C. reinhardtii_186446#1 | 389 | 390 |
| C. reinhardtii_195818#1 | 391 | 392 |
| C. sinensis_TC316#1 | 393 | 394 |
| C. vulgaris_25726#1 | 395 | 396 |
| C. vulgaris_61627#1 | 397 | 398 |
| C. vulgaris_69032#1 | 399 | 400 |
| Chlorella_32323#1 | 401 | 402 |
| Chlorella_48884#1 | 403 | 404 |
| E. esula_TC8568#1 | 405 | 406 |
| E. huxleyi_361296#1 | 407 | 408 |
| E. huxleyi_465530#1 | 409 | 410 |
| G. hirsutum_TC101219#1 | 411 | 412 |
| G. max_Glyma11g35910.1#1 | 413 | 414 |
| G. max_Glyma12g35880.2#1 | 415 | 416 |
| G. max_Glyma13g34500.2#1 | 417 | 418 |
| G. max_Glyma18g02490.1#1 | 419 | 420 |
| H. vulgare_TC175532#1 | 421 | 422 |
| L. serriola_TC1532#1 | 423 | 424 |
| L. virosa_TA4736_75947#1 | 425 | 426 |
| M. domestica_TC16580#1 | 427 | 428 |
| M. truncatula_AC119409_9.4#1 | 429 | 430 |
| M. truncatula_AC149472_12.4#1 | 431 | 432 |
| N. tabacum_TC14277#1 | 433 | 434 |
| O. basilicum_TA2234_39350#1 | 435 | 436 |
| O. glaberrima_Og013395.01#1 | 437 | 438 |
| O. lucimarinus_17656#1 | 439 | 440 |
| O. lucimarinus_18446#1 | 441 | 442 |
| O. lucimarinus_28976#1 | 443 | 444 |
| O. RCC809_32990#1 | 445 | 446 |
| O. RCC809_53774#1 | 447 | 448 |
| O. sativa_LOC_Os01g43390.1#1 | 449 | 450 |
| O. sativa_LOC_Os03g21900.1#1 | 451 | 452 |
| O. taurii_13162#1 | 453 | 454 |
| O. taurii_14772#1 | 455 | 456 |
| O. taurii_9156#1 | 457 | 458 |
| P. patens_112020#1 | 459 | 460 |
| P. patens_112870#1 | 461 | 462 |
| P. patens_188035#1 | 463 | 464 |
| P. persica_TC4822#1 | 465 | 466 |
| P. taeda_TA15428_3352#1 | 467 | 468 |
| P. tremuloides_826111#1 | 469 | 470 |
| P. tricornutum_19188#1 | 471 | 472 |
| P. tricornutum_20757#1 | 473 | 474 |
| R. communis_TA2993_3988#1 | 475 | 476 |
| S. bicolor_Sb01g036030.1#1 | 477 | 478 |
| S. bicolor_Sb03g028330.1#1 | 479 | 480 |
| S. lycopersicum_TC195523#1 | 481 | 482 |
| S. lycopersicum_TC209939#1 | 483 | 484 |
| S. moellendorffii_231982#1 | 485 | 486 |
| S. moellendorffii_438672#1 | 487 | 488 |
| S. officinarum_TC104808#1 | 489 | 490 |
| S. tuberosum_TC166562#1 | 491 | 492 |
| T. aestivum_TC347283#1 | 493 | 494 |
| T. pseudonana_3974#1 | 495 | 496 |
| Triphysaria_sp_TC2645#1 | 497 | 498 |
| V. carteri_103889#1 | 499 | 500 |
| V. carteri_74033#1 | 501 | 502 |
| V. carteri_83541#1 | 503 | 504 |
| V. vinifera_GSVIVT00027816001#1 | 505 | 506 |
| Z. mays_EB164247#1 | 507 | 508 |
| Z. mays_TC386418#1 | 509 | 510 |
| Z. mays_TC407629#1 | 511 | 512 |
| Z. mays_ZM07MC20070_BFb0115I19@20019#1 | 513 | 514 |

[0651] Sequences have been tentatively assembled and publicly disclosed by research institutions, such as The Institute for Genomic Research (TIGR; beginning with TA). The Eukaryotic Gene Orthologs (EGO) database may be used to identify such related sequences, either by keyword search or by using the BLAST algorithm with the nucleic acid sequence or polypeptide sequence of interest. Special nucleic acid sequence databases have been created for particular organisms, such as by the Joint Genome Institute. Furthermore, access to proprietary databases, has allowed the identification of novel nucleic acid and polypeptide sequences.

### 4. AS-MTT (Abiotic Stress Membrane Tethered Transcription Factor) Polypeptides

[0652] Sequences (full length cDNA, ESTs or genomic) related SEQ ID NO: 536 and SEQ ID NO: 537 were identified amongst those maintained in the Entrez Nucleotides database at the National Center for Biotechnology Information (NCBI) using database sequence search tools, such as the Basic Local Alignment Tool (BLAST) (Altschul et al. (1990) J. Mol. Biol. 215:403-410; and Altschul et al. (1997) Nucleic Acids Res. 25:3389-3402). The program is used to find regions of local similarity between sequences by comparing nucleic acid or polypeptide sequences to sequence databases and by calculating the statistical significance of matches. For example, the polypeptide encoded by the nucleic acid of SEQ ID NO: 536 was used for the TBLASTN algorithm, with default settings and the filter to ignore low complexity sequences set off. The output of the analysis was viewed by pairwise comparison, and ranked according to the probability score (E-value), where the score reflect the probability that a particular alignment occurs by chance (the lower the E-value, the more significant the hit). In addition to E-values, comparisons were also scored by percentage identity. Percentage identity refers to the number of identical nucleotides (or amino acids) between the two compared nucleic acid (or polypeptide) sequences over a particular length. In some instances, the default parameters may be adjusted to modify the stringency of the search. For example the E-value may be increased to show less stringent matches. This way, short nearly exact matches may be identified.

[0653] Table A4 provides a list of nucleic acid sequences related to the nucleic acid sequence used in the methods of the present invention.

TABLE A4
Examples of AS-MTT nucleic acids and polypeptides:

| | Nucleic | |
|---|---|---|
| | acid | |
| | SEQ | Polypeptide |
| Gene name in class | ID NO: | SEQ ID NO: |
| P. trichocarpa_657115#1_A | 536 | 537 |
| P. trichocarpa_657115#1.2_A | 538 | 539 |
| P. persica_TC1247#1_A | 540 | 541 |
| C. sinensis_TC3201#1_A | 542 | 543 |
| M. domestica_TC12261#1_A | 544 | 545 |
| A. thaliana_AT2G02730.1#1_A | 546 | 547 |
| G. hirsutum_TC83567#1_A | 548 | 549 |
| B. napus_TC66611#1_A | 550 | 551 |
| A. thaliana_AT1G27000.1#1_A | 552 | 553 |
| M. domestica_TC9509#1_A | 554 | 555 |
| M. truncatula_AC136286_4.4#1_A | 556 | 557 |
| P. trichocarpa_566293#1_A | 558 | 559 |
| S. officinarum_TC86637#1_B | 560 | 561 |
| P. americana_TA1256_3435#1_B | 562 | 563 |
| C. maculosa_TA1398_215693#1_B | 564 | 565 |
| O. sativa_LOC_Os01g08990.1#1_B | 566 | 567 |
| O. sativa_LOC_Os05g08980.1#1_B | 568 | 569 |
| T. officinale_TA751_50225#1_B | 570 | 571 |
| F. arundinacea_TC6829#1_B | 572 | 573 |
| S. bicolor_Sb03g003440.1#1_B | 574 | 575 |
| I. nil_TC6724#1_B | 576 | 577 |
| S. tuberosum_TC170010#1_B | 578 | 579 |
| Aquilegia_sp_TC25212#1_B | 580 | 581 |
| V. vinifera_GSVIVT00029000001#1_B | 582 | 583 |
| H. annuus_TC32349#1_B | 584 | 585 |
| A. comosus_DT336453#1_bZIP17-like | 586 | 587 |
| Triphysaria_sp_TC1899#1_bZIP17-like | 588 | 589 |
| M. truncatula_CU024880_148.4#1_bZIP17-like | 590 | 591 |
| L. sativa_TC16705#1_bZIP17-like | 592 | 593 |
| P. taeda_TA8248_3352#1_bZIP17-like | 594 | 595 |
| H. paradoxus_TA2663_73304#1_bZIP17-like | 596 | 597 |
| E. esula_TC4805#1_bZIP17-like | 598 | 599 |
| I. nil_TC113#1_bZIP17-like | 600 | 601 |
| A. thaliana_AT1G04960.1#1_bZIP17-like | 602 | 603 |
| O. sativa_LOC_Os09g30478.1#1_bZIP17-like | 604 | 605 |
| Aquilegia_sp_TC26001#1_bZIP17-like | 606 | 607 |
| H. vulgare_TC157185#1_bZIP17-like | 608 | 609 |
| P. trichocarpa_645036#1_bZIP17-like | 610 | 611 |
| T. aestivum_TC297361#1_bZIP17-like | 612 | 613 |
| S. tuberosum_TC182348#1_bZIP17-like | 614 | 615 |
| E. esula_TC6178#1_Unk | 616 | 617 |
| L. sativa_TC18726#1_Unk | 618 | 619 |
| P. patens_136490#1_Unk | 620 | 621 |
| V. vinifera_GSVIVT00002774001#1_Unk | 622 | 623 |
| C. solstitialis_TA4216_347529#1_Unk | 624 | 625 |
| S. moellendorffii_271950#1_Unk | 626 | 627 |
| A. thaliana_AT1G24267.1#1_Unk | 628 | 629 |
| G. hirsutum_TC128629#1_Unk | 630 | 631 |
| A. thaliana_AT1G24265.2#1_Unk | 632 | 633 |
| G. max_Glyma08g29150.1#1_Unk | 634 | 635 |
| S. bicolor_Sb03g009200.1#1_Unk | 636 | 637 |
| O. sativa_LOC_Os01g02180.1#1_Unk | 638 | 639 |
| Aquilegia_sp_TC28043#1_Unk | 640 | 641 |
| S. tuberosum_TC184255#1_Unk | 642 | 643 |
| P. trichocarpa_554754#1_Unk | 644 | 645 |
| Triphysaria_sp_TC917#1_Unk | 646 | 647 |

### 5. EXO-1 Polypeptide

[0654] Sequences (full length cDNA, ESTs or genomic) related to SEQ ID NO: 762 and SEQ ID NO: 763 were identified amongst those maintained in the Entrez Nucleotides database at the National Center for Biotechnology Information (NCBI) using database sequence search tools, such as the Basic Local Alignment Tool (BLAST) (Altschul et al. (1990) J. Mol. Biol. 215:403-410; and Altschul et al. (1997) Nucleic Acids Res. 25:3389-3402). The program is used to find regions of local similarity between sequences by comparing nucleic acid or polypeptide sequences to sequence databases and by calculating the statistical significance of matches. For example, the polypeptide encoded by the nucleic acid of SEQ ID NO: 762 was used for the TBLASTN algorithm, with default settings and the filter to ignore low complexity sequences set off. The output of the analysis was viewed by pairwise comparison, and ranked according to the probability score (E-value), where the score reflect the probability that a particular alignment occurs by chance (the lower the E-value, the more significant the hit). In addition to E-values, comparisons were also scored by percentage identity. Percentage identity refers to the number of identical nucleotides (or amino acids) between the two compared nucleic acid (or polypeptide) sequences over a particular length. In some instances, the default parameters may be adjusted to modify the stringency of the search. For example the E-value may be increased to show less stringent matches. This way, short nearly exact matches may be identified.

[0655] Table A5 provides a list of nucleic acid sequences related to SEQ ID NO: 762 and SEQ ID NO: 763.

TABLE A5
Examples of EXO-1 polypeptides:

| | Nucleic acid | Polypeptide |
|---|---|---|
| Name | SEQ ID NO: | SEQ ID NO: |
| A. thaliana_AT3G28030.1_I | 660 | 661 |
| D. melanogaster_mus201-PB_I | 662 | 663 |
| G. max_Glyma01g16370.1_{—} | 664 | 665 |
| H. sapiens_NM_000123.2_{—} | 666 | 667 |
| O. sativa_Os03g0205400_{—} | 668 | 669 |
| P. trichocarpa_scaff_XVII.231_I | 670 | 671 |
| S. bicolor_Sb01g043560.1_{—} | 672 | 673 |
| V. vinifera_GSVIVT00020778001_{—} | 674 | 675 |
| A. anophagefferens_19112_{—} | 676 | 677 |
| A. anophagefferens_53007_{—} | 678 | 679 |
| Aquilegia_sp_TC27969_{—} | 680 | 681 |
| Aquilegia_sp_TC29285_{—} | 682 | 683 |
| B. distachyon_TA2015_15368_{—} | 684 | 685 |
| B. napus_TC86178_{—} | 686 | 687 |
| C. reinhardtii_130834_{—} | 688 | 689 |
| C. vulgaris_45023_{—} | 690 | 691 |
| Chlorella_37697_{—} | 692 | 693 |
| D. melanogaster_Fen1-PA_{—} | 694 | 695 |
| G. max_Glyma10g28200.1_{—} | 696 | 697 |
| G. max_Glyma20g22190.2_{—} | 698 | 699 |
| H. sapiens_NM_004111.4_{—} | 700 | 701 |
| H. vulgare_TC165804_{—} | 702 | 703 |
| M. truncatula_AC148406_42.5_II | 704 | 705 |
| O. lucimarinus_42373_{—} | 706 | 707 |
| O. RCC809_87153_{—} | 708 | 709 |
| O. sativa_LOC_Os03g61820.1_II | 710 | 711 |
| O. sativa_Os05g0540100_II | 712 | 713 |
| O. taurii_28688_{—} | 714 | 715 |
| P. patens_207454_{—} | 716 | 717 |
| S. bicolor_Sb09g026950.1_{—} | 718 | 719 |
| S. cerevisiae_YKL113C_{—} | 720 | 721 |
| S. lycopersicum_TC192754_{—} | 722 | 723 |
| S. moellendorffii_111465_{—} | 724 | 725 |
| S. tuberosum_TC179198_{—} | 726 | 727 |
| T. aestivum_class_II | 728 | 729 |
| T. pseudonana_269347_{—} | 730 | 731 |
| V. carteri_75802_{—} | 732 | 733 |
| Z. mays_TC425293_{—} | 734 | 735 |
| A. thaliana_AT1G18090.1_III | 736 | 737 |
| A. thaliana_AT1G29630.2_III | 738 | 739 |
| C. vulgaris_30308_{—} | 740 | 741 |
| Chlorella_24009_{—} | 742 | 743 |
| D. melanogaster_tos-PA_III | 744 | 745 |
| G. max_Glyma05g29660.1_{—} | 746 | 747 |
| G. max_Glyma07g11320.1_{—} | 748 | 749 |
| H. sapiens_NM_130398.2_{—} | 750 | 751 |
| M. truncatula_AC153460_23.4_{—} | 752 | 753 |
| O. lucimarinus_13915_{—} | 754 | 755 |
| O. sativa_LOC_Os01g56940.1_III | 756 | 757 |
| P. patens_114516_{—} | 758 | 759 |
| P. patens_194153_{—} | 760 | 761 |
| P. trichocarpa_scaff_XI.493_III | 762 | 763 |
| P. trichocarpa_scaff_XV.367_{—} | 764 | 765 |
| S. cerevisiae_YDR263C_{—} | 766 | 767 |
| S. cerevisiae_YOR033C_{—} | 768 | 769 |
| S. moellendorffii_175620_{—} | 770 | 771 |
| V. carteri_61592_{—} | 772 | 773 |
| S. cerevisiae_YGR258C_{—} | 774 | 775 |
| A. thaliana_AT3G48900.2_IV | 776 | 777 |
| O. sativa_LOC_Os08g01130.1_IVa | 778 | 779 |
| P. trichocarpa_scaff_XV.1202_{—} | 780 | 781 |
| S. bicolor_Sb07g000270.1_{—} | 782 | 783 |
| V. vinifera_GSVIVT00009204001_{—} | 784 | 785 |
| A. thaliana_AT1G01880.1_{—} | 786 | 787 |
| O. sativa_LOC_Os09g35000.1_IVb | 788 | 789 |
| P. trichocarpa_scaff_XIV.232_{—} | 790 | 791 |
| S. bicolor_Sb02g030290.1_{—} | 792 | 793 |
| V. vinifera_GSVIVT00026338001_{—} | 794 | 795 |
| D. melanogaster_Gen-PA_V | 796 | 797 |
| H. sapiens_NM_182625.2_{—} | 798 | 799 |
| A. thaliana_AT1G74390.1_{—} | 800 | 801 |
| A. thaliana_AT4G39810.1_{—} | 802 | 803 |
| A. thaliana_AT5G07710.1_{—} | 804 | 805 |
| A. thaliana_AT5G61390.1_{—} | 806 | 807 |
| G. max_Glyma05g00890.1_{—} | 808 | 809 |
| G. max_Glyma17g11030.1_{—} | 810 | 811 |
| O. sativa_LOC_Os05g01200.1_{—} | 812 | 813 |
| O. sativa_LOC_Os10g26720.1_{—} | 814 | 815 |
| O. sativa_LOC_Os10g26730.1_{—} | 816 | 817 |
| O. sativa_LOC_Os10g29090.1_{—} | 818 | 819 |
| P. trichocarpa_scaff_129.36_{—} | 820 | 821 |
| P. trichocarpa_scaff_V.182_{—} | 822 | 823 |
| P. trichocarpa_scaff_VII.573_{—} | 824 | 825 |
| S. cerevisiae_YER041W_{—} | 826 | 827 |

[0656] Sequences have been tentatively assembled and publicly disclosed by research institutions, such as The Institute for Genomic Research (TIGR; beginning with TA). The Eukaryotic Gene Orthologs (EGO) database may be used to identify such related sequences, either by keyword search or by using the BLAST algorithm with the nucleic acid sequence or polypeptide sequence of interest. Special nucleic acid sequence databases have been created for particular organisms, such as by the Joint Genome Institute. Furthermore, access to proprietary databases, has allowed the identification of novel nucleic acid and polypeptide sequences.

### 6. YiAP2 Polypeptides

[0657] Sequences (full length cDNA, ESTs or genomic) related to SEQ ID NO: 835 and SEQ ID NO: 836 were identified amongst those maintained in the Entrez Nucleotides database at the National Center for Biotechnology Information (NCBI) using database sequence search tools, such as the Basic Local Alignment Tool (BLAST) (Altschul et al. (1990) J. Mol. Biol. 215:403-410; and Altschul et al. (1997) Nucleic Acids Res. 25:3389-3402). The program is used to find regions of local similarity between sequences by comparing nucleic acid or polypeptide sequences to sequence databases and by calculating the statistical significance of matches. For example, the polypeptide encoded by the nucleic acid of SEQ ID NO: 835 was used for the TBLASTN algorithm, with default settings and the filter to ignore low complexity sequences set off. The output of the analysis was viewed by pairwise comparison, and ranked according to the probability score (E-value), where the score reflect the probability that a particular alignment occurs by chance (the lower the E-value, the more significant the hit). In addition to E-values, comparisons were also scored by percentage identity. Percentage identity refers to the number of identical nucleotides (or amino acids) between the two compared nucleic acid (or polypeptide) sequences over a particular length. In some instances, the default parameters may be adjusted to modify the stringency of the search. For example the E-value may be increased to show less stringent matches. This way, short nearly exact matches may be identified.

[0658] Table A6 provides a list of nucleic acid sequences related to SEQ ID NO: 835 and SEQ ID NO: 836.

TABLE A6
Examples of YiAP2 polypeptides:

| | Nucleic acid | Polypeptide |
|---|---|---|
| Name | SEQ ID NO: | SEQ ID NO: |
| Medtr_AP2 | 835 | 836 |
| A. thaliana_AT1G16060.1#1 | 837 | 838 |
| Aquilegia_sp_TC20979#1 | 839 | 840 |
| C. clementina_DY288437#1 | 841 | 842 |
| C. clementina_DY290073#1 | 843 | 844 |
| C. clementina_DY301305#1 | 845 | 846 |
| C. clementina_TC1922#1 | 847 | 848 |
| C. clementina_TC2567#1 | 849 | 850 |
| C. sinensis_EY655317#1 | 851 | 852 |
| C. sinensis_EY726128#1 | 853 | 854 |
| C. sinensis_TC9216#1 | 855 | 856 |
| G. hirsutum_TC125414#1 | 857 | 858 |
| G. max_Glyma07g02380.1#1 | 859 | 860 |
| G. max_Glyma17g07860.1#1 | 861 | 862 |
| M. truncatula_AC126784_13.5#1 | 863 | 864 |
| O. basilicum_TA1087_39350#1 | 865 | 866 |
| O. sativa_LOC_Os08g34360.1#1 | 867 | 868 |
| O. sativa_LOC_Os09g25600.1#1 | 869 | 870 |
| P. trichocarpa_800184#1 | 871 | 872 |
| R. communis_EG658396#1 | 873 | 874 |
| R. communis_TA2948_3988#1 | 875 | 876 |
| S. bicolor_Sb02g025080.1#1 | 877 | 878 |
| S. tuberosum_TC187592#1 | 879 | 880 |
| Triphysaria_sp_TC12598#1 | 881 | 882 |
| V. vinifera_GSVIVT00017130001#1 | 883 | 884 |
| Z. mays_TC386652#1 | 885 | 886 |

[0659] Sequences have been tentatively assembled and publicly disclosed by research institutions, such as The Institute for Genomic Research (TIGR; beginning with TA). The Eukaryotic Gene Orthologs (EGO) database may be used to identify such related sequences, either by keyword search or by using the BLAST algorithm with the nucleic acid sequence or polypeptide sequence of interest. Special nucleic acid sequence databases have been created for particular organisms, such as by the Joint Genome Institute. Furthermore, access to proprietary databases, has allowed the identification of novel nucleic acid and polypeptide sequences.

### Example 2

### Alignment of Sequences Related to the Polypeptide Sequences Used in the Methods of the Invention

[0660] 1. FSM1-like (Fruit Sant/Myb) Polypeptides

[0661] Alignment of a number of FSM1-like polypeptide sequences was performed using the ClustaIW 2.0 algorithm of progressive alignment (Thompson et al. (1997) Nucleic Acids Res 25:4876-4882; Chenna et al. (2003). Nucleic Acids Res 31:3497-3500) with standard setting (slow alignment, similarity matrix: Gonnet, gap opening penalty 10, gap extension penalty: 0.2). Minor manual editing was done to further optimise the alignment. The FSM1-like polypeptides are aligned in FIG. 2.

[0662] A phylogenetic tree of FSM1-like polypeptides (FIG. 3) was constructed as follows: the alignment was generated using MAFFT (Katoh and Toh (2008) Briefings in Bioinformatics 9:286-298). A neighbour-joining tree was calculated using QuickTree (Howe et al. (2002), Bioinformatics 18(11): 1546-7), 100 bootstrap repetitions. The circular cladogram was drawn using Dendroscope (Huson et al. (2007), BMC Bioinformatics 8(1):460). Confidence for 100 bootstrap repetitions is indicated for major branching.

2. PIF3-like (Phytochrome Interacting Factor 3) Polypeptides

[0663] Alignment of polypeptide sequences was performed using the ClustalW 2.0 algorithm of progressive alignment (Thompson et al. (1997) Nucleic Acids Res 25:4876-4882; Chenna et al. (2003). Nucleic Acids Res 31:3497-3500) with standard setting (slow alignment, similarity matrix: Gonnet, gap opening penalty 10, gap extension penalty: 0.2). Minor manual editing was done to further optimise the alignment. Minor manual editing was done to further optimise the alignment. The PIF3-like polypeptides are aligned in FIG. 7.

[0664] A phylogenetic tree of PIF3-like polypeptides was constructed using MAFFT (Katoh and Toh (2008) Briefings in Bioinformatics 9:286-298) (FIG. 8). A neighbour-joining tree was calculated using QuickTree (Howe et al. (2002), Bioinformatics 18(11): 1546-7), 100 bootstrap repetitions. The slanted cladogram was drawn using Dendroscope (Huson et al. (2007), BMC Bioinformatics 8(1):460). Confidence for 100 bootstrap repetitions is indicated for the major branches.

### 3. UROD (Uroporphyrinogen III Decarboxylase) Polypeptide

[0665] Alignment of polypeptide sequences was performed using the ClustalW 2.0 algorithm of progressive alignment (Thompson et al. (1997) Nucleic Acids Res 25:4876-4882; Chenna et al. (2003). Nucleic Acids Res 31:3497-3500) with standard setting (slow alignment, similarity matrix: Gonnet (Blosum 62 for polypeptide alignment) gap opening penalty 10, gap extension penalty: 0.2). Minor manual editing was done to further optimise the alignment. An alignment of UROD polypeptides is shown in FIG. 11.

[0666] A phylogenetic tree of UROD polypeptides (FIGS. 12 and 13) was constructed as described under the Description of Figures.

### 4. AS-MTT (Abiotic Stress Membrane Tethered Transcription Factor) Polypeptides

[0667] Alignment of polypeptide sequences was performed using the CLUSTAL 2.0.11 algorithm of progressive alignment (Thompson et al. (1997) Nucleic Acids Res 25:4876-4882; Chenna et al. (2003). Nucleic Acids Res 31:3497-3500) with standard setting (slow alignment, gap opening penalty 10, gap extension penalty: 0.2). Minor manual editing was done to further optimise the alignment. The AS-MTT polypeptides are aligned in FIG. 16.

[0668] To perform phylogenetic analysis the polypeptides of Table A4 were aligned using MAFT (Katoh and Toh (2008). Briefings in Bioinformatics 9:286-298.). A neighbour-joining tree was calculated using QuickTree1.1 (Howe et al. (2002). Bioinformatics 18(11):1546-7). A cladogram was drawn using Dendroscope2.0.1 (Hudson et al. (2007). Bioinformatics 8(1):460). The polypeptide represented by SEQ ID NO: 2 clustered with the polypeptides of Glade A. Polypeptides in Glade B represent closer evolutionary related SEQ ID NO: 537 homologues.

[0669] Polypeptides falling within Glade A are the following: P.trichocarpa_{—}566293#1_A, P.trichocarpa_{—}657115#1_A, P.trichocarpa_{—}657115#1.2_A, P.persica_TC1247#1_A, M.domestica_TC12261#1_A, G.hirsutum_TC83567#1_A, A.thaliana_AT2G02730.1#1_A, A.thaliana_AT1G27000.1#1_A, M.domestica_TC9509#1_A, B.napus_TC66611#1_A, C.sinensis_TC3201#1_A, M.truncatula_AC136286_{—}4.4#1_A.

[0670] Polypeptides falling within Glade B are the following: S.officinarum_TC86637#1_B, P.americana_TA1256_{—}3435#1_B, C.maculosa_TA1398_{—}215693#1_B, O.sativa_LOC_Os01g08990.1#1_B, O.sativa_LOC_Os05g08980.1#1_B, T.officinale_TA751_{—}50225#1_B, F.arundinacea_TC6829#1_B, S.bicolor_Sb03g003440.1#1_B, I.nil_TC6724#1_B, S.tuberosum_TC170010#1_B, Aquilegia_sp_TC25212#1_B, V.vinifera_GSVIVT00029000001#1_B, H.annuus_TC32349#1_B.

### 5. EXO-1 Polypeptide

[0671] The alignment was generated using MAFFT (Katoh and Toh (2008) Briefings in Bioinformatics 9:286-298). A phylogenetic tree of EXO-1 polypeptides (FIG. 19) was constructed using a neighbour-joining tree, which was calculated using Quick-Tree (Howe et al. (2002), Bioinformatics 18(11): 1546-7), 100 bootstrap repetitions. The circular phylogram was drawn using Dendroscope (Huson et al. (2007), BMC Bioinformatics 8(1):460). Confidence for 100 bootstrap repetitions is indicated for major branching. Major branching position is indicated by circles.

### 6. YiAP2 Polypeptides

[0672] A multiple alignment of YiAP2 polypeptides (FIG. 22) was performed using default values (gap open penalty of 10, for the gap extension penalty of 0,1 and the selected weight matrix is Blosum 62) with the align algorithm as provided in the AlignX programme from the Vector NTI (Invitrogen), which is based on the ClustaIW algorithm of progressive alignment (Thompson et al. (1997) Nucleic Acids Res 25:4876-4882; Chenna et al. (2003). Nucleic Acids Res 31:3497-3500).

### Example 3

### Calculation of Global Percentage Identity Between Polypeptide Sequences Useful in Performing the Methods of the Invention

[0673] Global percentages of similarity and identity between full length polypeptide sequences useful in performing the methods of the invention were determined using one of the methods available in the art, the MatGAT (Matrix Global Alignment Tool) software (BMC Bioinformatics. 2003 4:29. MatGAT: an application that generates similarity/identity matrices using protein or DNA sequences. Campanella J J, Bitincka L, Smalley J; software hosted by Ledion Bitincka). MatGAT software generates similarity/identity matrices for DNA or protein sequences without needing pre-alignment of the data. The program performs a series of pair-wise alignments using the Myers and Miller global alignment algorithm (with a gap opening penalty of 12, and a gap extension penalty of 2), calculates similarity and identity using for example Blosum 62 (for polypeptides), and then places the results in a distance matrix. Sequence similarity is shown in the bottom half of the dividing line and sequence identity is shown in the top half of the diagonal dividing line.

[0674] Parameters used in the comparison were: Scoring matrix: Blosum62, First Gap: 12, Extending Gap: 2.

1. FSM1-like (Fruit Sant/Myb) Polypeptides

[0675] Results of the analysis are shown in Table B1 for the global similarity and identity over the full length of a number of FSM1-like polypeptide sequences. The sequence identity (in %) between the FSM1-like polypeptide sequences useful in performing the methods of the invention is generally 50% or higher compared to SEQ ID NO: 2, but can be as low as 19% within the group of FSM1-like polypeptides given in the sequence listing.

TABLE B1
MatGAT results for global similarity and identity over the full length of the polypeptide sequences.

| | | 1 | 2 | 3 | 4 | 5 | 6 | 7 | 8 | 9 | 10 | 11 | 12 | 13 |
|---|---|---|---|---|---|---|---|---|---|---|---|---|---|---|
| 1. | M. guttatus_DV207881 | | 59.4 | 55.7 | 59.0 | 61.2 | 57.4 | 52.9 | 57.8 | 60.5 | 63.9 | 62.8 | 62.7 | 63.9 |
| 2. | A. majus_TA4522_4151 | 71.0 | | 54.2 | 58.3 | 58.1 | 69.3 | 68.6 | 59.8 | 58.3 | 61.3 | 63.9 | 61.2 | 61.9 |
| 3. | S. lycopersicum_TA46686 | 70.5 | 73.1 | | 79.5 | 63.6 | 62.4 | 60.8 | 63.6 | 67.0 | 64.8 | 68.2 | 67.4 | 68.2 |
| 4. | N. benthamiana_EH366122 | 74.7 | 73.1 | 86.4 | | 69.0 | 57.4 | 59.8 | 73.2 | 69.8 | 74.1 | 72.9 | 78.3 | 78.0 |
| 5. | G. hirsutum_DR461014 | 77.1 | 72.0 | 72.7 | 80.2 | | 56.4 | 61.8 | 72.9 | 72.1 | 72.8 | 75.3 | 70.6 | 71.8 |
| 6. | V. vinifera_EE072107 | 67.3 | 77.2 | 69.3 | 65.3 | 71.3 | | 77.5 | 63.4 | 65.3 | 59.4 | 68.3 | 63.4 | 64.4 |
| 7. | M. domestica_DR994824 | 66.7 | 82.4 | 71.6 | 66.7 | 70.6 | 88.2 | | 68.6 | 69.9 | 61.8 | 72.8 | 69.6 | 71.6 |
| 8. | G. hirsutum_TA31277_3635 | 72.3 | 73.1 | 76.1 | 84.0 | 87.7 | 70.3 | 73.5 | | 80.2 | 79.3 | 80.2 | 80.7 | 81.7 |
| 9. | G. hirsutum_DW503354 | 76.7 | 74.2 | 78.4 | 79.1 | 84.9 | 74.3 | 77.5 | 86.0 | | 73.3 | 83.7 | 77.9 | 79.1 |
| 10. | H. exilis_EE652824 | 77.1 | 71.0 | 73.9 | 80.2 | 80.2 | 66.3 | 66.7 | 86.3 | 81.4 | | 76.5 | 79.5 | 81.7 |
| 11. | E. gunnii_CT985658 | 77.6 | 78.5 | 79.5 | 81.2 | 84.7 | 77.2 | 79.4 | 85.9 | 90.7 | 80.0 | | 84.9 | 84.9 |
| 12. | L. sativa_TA7946_4236 | 75.9 | 78.5 | 77.3 | 84.3 | 86.7 | 74.3 | 75.5 | 91.6 | 88.4 | 84.3 | 91.8 | | 96.4 |
| 13. | C. intybus_EH706852 | 75.9 | 77.4 | 77.3 | 84.1 | 87.8 | 75.2 | 76.5 | 91.5 | 89.5 | 85.4 | 90.6 | 96.4 | |
| 14. | P. trichocarpa_sc_IV.1184 | 64.3 | 80.6 | 73.5 | 73.5 | 74.5 | 82.2 | 84.3 | 77.6 | 80.6 | 71.4 | 79.6 | 80.6 | 80.6 |
| 15. | P. trichocarpa_557252 | 70.1 | 76.3 | 78.4 | 79.3 | 82.8 | 76.2 | 76.5 | 85.1 | 89.7 | 80.5 | 89.7 | 90.8 | 88.5 |
| 16. | P. euphratica_AJ768574 | 71.3 | 77.4 | 79.5 | 80.5 | 83.9 | 77.2 | 77.5 | 86.2 | 90.8 | 79.3 | 90.8 | 92.0 | 89.7 |
| 17. | M. truncatula_AC135566 | 65.9 | 82.8 | 73.6 | 72.5 | 71.4 | 72.3 | 75.5 | 71.4 | 72.5 | 67.0 | 71.4 | 72.5 | 72.5 |
| 18. | G. max_Glyma06g46590.1 | 65.2 | 83.9 | 72.8 | 70.7 | 76.1 | 76.2 | 80.4 | 77.2 | 77.2 | 67.4 | 73.9 | 78.3 | 78.3 |
| 19. | G. max_Glyma04g16390.1 | 66.3 | 83.9 | 75.0 | 70.7 | 75.0 | 78.2 | 82.4 | 77.2 | 78.3 | 69.6 | 75.0 | 79.3 | 79.3 |
| 20. | G. max_Glyma02g18210.1 | 65.6 | 81.7 | 69.9 | 69.9 | 71.0 | 76.2 | 78.4 | 72.0 | 75.3 | 65.6 | 72.0 | 75.3 | 74.2 |
| 21. | M. truncatula_AC157502 | 64.1 | 80.6 | 71.7 | 70.7 | 78.3 | 80.2 | 81.4 | 76.1 | 77.2 | 70.7 | 76.1 | 79.3 | 78.3 |
| 22. | G. max_Glyma03g28050.1 | 64.9 | 80.4 | 69.1 | 68.0 | 70.1 | 81.2 | 80.4 | 71.1 | 74.2 | 70.1 | 76.3 | 77.3 | 76.3 |
| 23. | A. thaliana_At4g39250 | 63.0 | 77.0 | 68.0 | 65.0 | 67.0 | 84.2 | 85.3 | 69.0 | 72.0 | 65.0 | 73.0 | 73.0 | 72.0 |
| 24. | T. salsuginea_DN773374 | 58.0 | 76.0 | 65.0 | 67.0 | 66.0 | 81.2 | 84.3 | 69.0 | 73.0 | 64.0 | 70.0 | 69.0 | 71.0 |
| 25. | B. napus_BN06MC20309 | 56.0 | 73.0 | 62.0 | 64.0 | 63.0 | 79.2 | 81.4 | 66.0 | 70.0 | 62.0 | 68.0 | 68.0 | 68.0 |
| 26. | A. thaliana_At2g21650 | 57.4 | 78.2 | 65.3 | 66.3 | 66.3 | 82.2 | 84.3 | 68.3 | 72.3 | 64.4 | 69.3 | 70.3 | 69.3 |
| | | 14 | 15 | 16 | 17 | 18 | 19 | 20 | 21 | 22 | 23 | 24 | 25 | 26 |
| 1. | M. guttatus_DV207881 | 52.0 | 56.3 | 57.5 | 54.7 | 52.6 | 53.7 | 51.6 | 55.3 | 51.5 | 49.0 | 43.0 | 43.0 | 44.6 |
| 2. | A. majus_TA4522_4151 | 66.7 | 62.9 | 63.9 | 64.9 | 64.2 | 65.3 | 66.0 | 69.1 | 64.9 | 57.0 | 56.4 | 55.4 | 58.8 |
| 3. | S. lycopersicum_TA46686 | 60.2 | 62.5 | 63.6 | 60.0 | 62.1 | 62.1 | 52.6 | 56.4 | 58.6 | 56.0 | 52.0 | 50.0 | 54.5 |
| 4. | N. benthamiana_EH366122 | 64.3 | 67.8 | 69.0 | 56.4 | 55.9 | 57.0 | 53.2 | 58.1 | 60.2 | 55.0 | 53.0 | 51.0 | 56.4 |
| 5. | G. hirsutum_DR461014 | 60.2 | 69.0 | 70.1 | 60.4 | 65.6 | 64.5 | 58.1 | 64.1 | 59.8 | 55.0 | 54.0 | 50.0 | 55.4 |
| 6. | V. vinifera_EE072107 | 71.3 | 68.3 | 69.3 | 59.8 | 63.7 | 64.7 | 62.4 | 69.3 | 66.3 | 68.3 | 64.4 | 63.4 | 68.6 |
| 7. | M. domestica_DR994824 | 74.5 | 70.6 | 71.6 | 65.0 | 71.8 | 69.9 | 61.8 | 69.6 | 69.2 | 70.6 | 66.7 | 63.7 | 70.6 |
| 8. | G. hirsutum_TA31277_3635 | 68.4 | 79.3 | 80.5 | 58.9 | 69.1 | 68.1 | 57.9 | 64.9 | 62.6 | 61.0 | 60.0 | 54.0 | 59.4 |
| 9. | G. hirsutum_DW503354 | 68.4 | 78.2 | 79.3 | 55.8 | 65.3 | 66.3 | 57.9 | 63.8 | 65.7 | 63.4 | 57.4 | 55.4 | 57.4 |
| 10. | H. exilis_EE652824 | 67.3 | 74.7 | 73.6 | 58.2 | 55.9 | 57.0 | 51.6 | 58.7 | 61.9 | 55.0 | 52.0 | 49.0 | 54.5 |
| 11. | E. gunnii_CT985658 | 73.5 | 83.9 | 85.1 | 60.6 | 65.6 | 64.5 | 58.5 | 67.7 | 68.4 | 65.3 | 56.4 | 55.4 | 60.4 |
| 12. | L. sativa_TA7946_4236 | 71.4 | 79.5 | 80.7 | 58.9 | 62.1 | 61.1 | 55.8 | 64.9 | 64.6 | 62.4 | 55.0 | 53.5 | 59.4 |
| 13. | C. intybus_EH706852 | 72.4 | 79.3 | 80.5 | 60.0 | 63.2 | 62.1 | 55.8 | 63.8 | 64.6 | 63.0 | 56.0 | 54.0 | 59.4 |
| 14. | P. trichocarpa_sc_IV.1184 | | 80.6 | 81.6 | 58.6 | 59.6 | 58.6 | 57.1 | 65.3 | 63.6 | 64.0 | 59.0 | 56.0 | 63.4 |
| 15. | P. trichocarpa_557252 | 85.7 | | 98.9 | 57.9 | 64.9 | 64.9 | 57.9 | 68.1 | 65.7 | 63.0 | 62.0 | 59.0 | 65.3 |
| 16. | P. euphratica_AJ768574 | 86.7 | 98.9 | | 58.9 | 66.0 | 64.9 | 58.9 | 67.0 | 64.6 | 64.0 | 61.0 | 58.0 | 64.4 |
| 17. | M. truncatula_AC135566 | 74.5 | 71.4 | 72.5 | | 80.6 | 79.6 | 72.3 | 72.0 | 73.5 | 58.4 | 60.4 | 60.4 | 59.8 |
| 18. | G. max_Glyma06g46590.1 | 75.5 | 76.1 | 77.2 | 88.0 | | 92.4 | 74.5 | 76.3 | 76.5 | 67.3 | 66.3 | 62.4 | 64.7 |
| 19. | G. max_Glyma04g16390.1 | 76.5 | 78.3 | 78.3 | 90.2 | 96.7 | | 77.7 | 77.4 | 75.5 | 67.3 | 66.3 | 62.4 | 65.7 |
| 20. | G. max_Glyma02g18210.1 | 75.5 | 73.1 | 74.2 | 86.0 | 89.2 | 89.2 | | 76.6 | 72.2 | 61.0 | 59.0 | 60.0 | 61.4 |
| 21. | M. truncatula_AC157502 | 80.6 | 80.4 | 79.3 | 83.7 | 88.0 | 89.1 | 86.0 | | 79.4 | 66.0 | 66.0 | 64.0 | 65.3 |
| 22. | G. max_Glyma03g28050.1 | 79.6 | 77.3 | 76.3 | 82.5 | 87.6 | 89.7 | 85.6 | 90.7 | | 65.7 | 62.7 | 61.8 | 64.1 |
| 23. | A. thaliana_At4g39250 | 78.0 | 74.0 | 75.0 | 75.0 | 81.0 | 81.0 | 81.0 | 77.0 | 80.0 | | 75.0 | 72.0 | 73.3 |
| 24. | T. salsuginea_DN773374 | 77.0 | 74.0 | 73.0 | 77.0 | 80.0 | 82.0 | 78.0 | 79.0 | 81.0 | 87.0 | | 88.0 | 89.1 |
| 25. | B. napus_BN06MC20309 | 74.0 | 71.0 | 70.0 | 75.0 | 77.0 | 79.0 | 75.0 | 76.0 | 78.0 | 84.0 | 97.0 | | 83.2 |
| 26. | A. thaliana_At2g21650 | 76.2 | 74.3 | 73.3 | 73.3 | 77.2 | 80.2 | 78.2 | 78.2 | 80.2 | 84.2 | 94.1 | 91.1 | |

2. PIF3-like (Phytochrome Interacting Factor 3) Polypeptides

[0676] Results of the MatGat analysis are shown in Table B2 for the global similarity and identity over the full length of the polypeptide sequences. The sequence identity (in %) between the PIF3-like polypeptide sequences useful in performing the methods of the invention can be as low as 28.6%, and does not go higher than 47.2% when compared to SEQ ID NO: 293 (sequence 7, Os12g41650), which shows that outside of the conserved regions, there is little sequence conservation.

TABLE B2
MatGAT results for global similarity and identity over the full length of the
polypeptide sequences.

| | | 1 | 2 | 3 | 4 | 5 | 6 | 7 | 8 | 9 | 10 |
|---|---|---|---|---|---|---|---|---|---|---|---|
| 1. | AT2G43010_1 | | 56.9 | 33.7 | 35.9 | 34.8 | 30.4 | 32.4 | 38.6 | 38.3 | 33.6 |
| 2. | AT3G59060_1 | 72.9 | | 31.6 | 36.1 | 34.5 | 28.9 | 31.2 | 38.0 | 36.5 | 34.0 |
| 3. | Glyma02g45150_1 | 47.2 | 46.1 | | 64.2 | 62.1 | 31.9 | 28.6 | 40.1 | 50.5 | 42.4 |
| 4. | Glyma08g41620_1 | 51.4 | 49.2 | 73.1 | | 82.9 | 34.5 | 33.0 | 43.1 | 53.2 | 44.4 |
| 5. | Glyma18g14530_1 | 50.2 | 47.7 | 72.6 | 89.4 | | 33.1 | 30.3 | 43.6 | 50.4 | 42.0 |
| 6. | Os03g43810_1 | 44.5 | 42.7 | 43.1 | 48.4 | 46.3 | | 47.2 | 28.9 | 34.7 | 32.4 |
| 7. | Os12g41650_2 | 48.8 | 47.9 | 42.9 | 45.1 | 41.9 | 56.7 | | 32.0 | 33.8 | 34.9 |
| 8. | Pt_scaff_V_1141_1 | 53.6 | 56.9 | 52.0 | 58.2 | 57.7 | 44.1 | 49.1 | | 65.0 | 38.7 |
| 9. | Pt_TC100024_1 | 51.1 | 52.1 | 63.5 | 66.6 | 66.0 | 46.6 | 45.8 | 71.1 | | 48.7 |
| 10. | Sl_TC192046_1 | 49.7 | 49.5 | 56.8 | 62.8 | 59.6 | 44.8 | 47.1 | 56.0 | 64.0 | |

### 3. UROD (Uroporphyrinogen III Decarboxylase) Polypeptide

[0677] Results of the software analysis are shown in Table B3 for the global similarity and identity over the full length of the polypeptide sequences. The sequence identity (in %) between the UROD polypeptide sequences useful in performing the methods of the invention can be as low as 24% (but is generally higher than 30%) compared to SEQ ID NO: 368.

TABLE B3
MatGAT results for global similarity and identity over the full length of the polypeptide sequences.

| | | 1 | 2 | 3 | 4 | 5 | 6 | 7 | 8 | 9 | 10 | 11 | 12 | 13 | 14 | 15 |
|---|---|---|---|---|---|---|---|---|---|---|---|---|---|---|---|---|
| 1. | H. vulgare_TC175532#1_SPT_HEM1 | | 88.5 | 86 | 87 | 65.4 | 66.7 | 66 | 66.6 | 55.6 | 66.7 | 67 | 66.4 | 64.2 | 55.1 | 46 |
| 2. | S. bicolor_Sb03g028330.1#1_SPT_HEM1 | | | 94.6 | 88.9 | 66.8 | 67.6 | 68.4 | 68.3 | 56.9 | 68 | 67.7 | 67.6 | 64.9 | 54.3 | 46.2 |
| 3. | Z. mays_ZM07MC20070_BFb0115I19@20019#1_SPT_HEM1 | | | | 86.9 | 65.4 | 65.3 | 67 | 67.4 | 56.5 | 68 | 67.2 | 67.4 | 63 | 54.3 | 46.6 |
| 4. | O. sativa_LOC_Os01g43390.1#1_SPT_HEM1 | | | | | 66.1 | 65.8 | 68 | 66.6 | 56 | 67.2 | 66.3 | 69.1 | 65.9 | 56.3 | 46.4 |
| 5. | A. thaliana_AT3G14930.1#1_SPT_HEM1 | | | | | | 89.8 | 71.5 | 74.5 | 59.1 | 75 | 72.9 | 72.1 | 71.1 | 53.6 | 44.4 |
| 6. | B. napus_TC76241#1_SPT_HEM1 | | | | | | | 73 | 74.7 | 59.2 | 75.5 | 71.9 | 72.8 | 72.2 | 54 | 44.3 |
| 7. | M. truncatula_AC119409_9.4#1_SPT_HEM1 | | | | | | | | 85.2 | 63.7 | 76.4 | 74.2 | 74.6 | 74.5 | 54.3 | 46.8 |
| 8. | G. max_Glyma12g35880.2#1_SPT_HEM1 | | | | | | | | | 71.9 | 79.4 | 78.2 | 75.4 | 72.5 | 54 | 46.6 |
| 9. | G. max_Glyma13g34500.2#1_SPT_HEM1 | | | | | | | | | | 62 | 63.8 | 58.1 | 55.6 | 42.8 | 40.1 |
| 10. | P. trichocarpa_URO-D_Poplus_trichocarpa_SPT_HEM1 | | | | | | | | | | | 82.2 | 76.1 | 75.4 | 52.6 | 46.8 |
| 11. | V. vinifera_GSVIVT00027816001#1_SPT_HEM1 | | | | | | | | | | | | 77.3 | 73.2 | 52.8 | 46.3 |
| 12. | Aquilegia_sp_TC24505#1_SPT_HEM1 | | | | | | | | | | | | | 75.8 | 54.7 | 46.1 |
| 13. | S. lycopersicum_TC195523#1_SPT_HEM1 | | | | | | | | | | | | | | 52.9 | 44.2 |
| 14. | C. reinhardtii_186446#1_CHL_HEM1 | | | | | | | | | | | | | | | 50.1 |
| 15. | C. vulgaris_61627#1_CHL_HEM2 | | | | | | | | | | | | | | | |
| 16. | Chlorella_32323#1_CHL_HEM2 | | | | | | | | | | | | | | | |
| 17. | O. lucimarinus_17656#1_CHL_HEM2 | | | | | | | | | | | | | | | |
| 18. | O. taurii_13162#1_CHL_HEM2 | | | | | | | | | | | | | | | |
| 19. | A. thaliana_AT2G40490.1#1_SPT_HEM2 | | | | | | | | | | | | | | | |
| 20. | B. napus_TC68105#1_SPT_HEM2 | | | | | | | | | | | | | | | |
| 21. | C. sinensis_TC316#1_SPT_HEM2 | | | | | | | | | | | | | | | |
| 22. | G. hirsutum_TC101219#1_SPT_HEM2 | | | | | | | | | | | | | | | |
| 23. | G. max_Glyma18g02490.1#1_SPT_HEM2 | | | | | | | | | | | | | | | |
| 24. | M. truncatula_AC149472_12.4#1_SPT_HEM2 | | | | | | | | | | | | | | | |
| 25. | M. domestica_TC16580#1_SPT_HEM2 | | | | | | | | | | | | | | | |
| 26. | N. tabacum_TC14277#1_SPT_HEM2 | | | | | | | | | | | | | | | |
| 27. | S. lycopersicum_TC209939#1_SPT_HEM2 | | | | | | | | | | | | | | | |
| 28. | O. basilicum_TA2234_39350#1_SPT_HEM2 | | | | | | | | | | | | | | | |
| 29. | O. sativa_LOC_Os03g21900.1#1_SPT_HEM2 | | | | | | | | | | | | | | | |
| 30. | S. bicolor_Sb01g036030.1#1_SPT_HEM2 | | | | | | | | | | | | | | | |
| 31. | P. taeda_TA15428_3352#1_SPT_HEM2 | | | | | | | | | | | | | | | |
| 32. | P. patens_188035#1_SPT_HEM2 | | | | | | | | | | | | | | | |
| 33. | S. moellendorffii_438672#1_SPT_HEM2 | | | | | | | | | | | | | | | |
| 34. | Cyanothece_sp._YP_001804380.1_Cyanothece_sp._BAC_Cyano | | | | | | | | | | | | | | | |
| 35. | Synechocystis_sp._NP_442753.1_Synechocystis_sp._BAC_Cyano | | | | | | | | | | | | | | | |
| 36. | Cyanothece_sp._YP_002373141.1_Cyanothece_sp._BAC_Cyano | | | | | | | | | | | | | | | |
| 37. | Cyanothece_sp._YP_002377951.1_BAC_Cyano | | | | | | | | | | | | | | | |
| 38. | M. aeruginosa_YP_001658143.1_Microcystis_aeruginosa_BAC_Cyano | | | | | | | | | | | | | | | |
| 39. | Synechococcus_sp._YP_001734083.1_Synechococcus_sp._BAC_Cyano | | | | | | | | | | | | | | | |
| 40. | T. erythraeum_YP_721451.1_Trichodesmium_erythraeum_BAC_Cyano | | | | | | | | | | | | | | | |
| 41. | P. marinus_YP_001014466.1_Prochlorococcus_marinus_BAC_Cyano | | | | | | | | | | | | | | | |
| 42. | P. marinus_YP_291214.1_Prochlorococcus_marinus_BAC_Cyano | | | | | | | | | | | | | | | |
| 43. | Synechococcus_sp._YP_376928.1_Synechococcus_sp._BAC_Cyano | | | | | | | | | | | | | | | |
| 44. | C. reinhardtii_195818#1_CHL_Others | | | | | | | | | | | | | | | |
| 45. | C. vulgaris_25726#1_CHL_Others | | | | | | | | | | | | | | | |
| 46. | O. lucimarinus_28976#1_CHL_Others | | | | | | | | | | | | | | | |
| 47. | O. RCC809_53774#1_CHL_Others | | | | | | | | | | | | | | | |
| 48. | O. taurii_14772#1_CHL_Others | | | | | | | | | | | | | | | |
| 49. | P. patens_112870#1_SPT_Others | | | | | | | | | | | | | | | |
| 50. | A. anophagefferens_30614#1_STR_Others | | | | | | | | | | | | | | | |
| 51. | P. tricornutum_20757#1_STR_Others | | | | | | | | | | | | | | | |
| 52. | T. pseudonana_3974#1_STR_Others | | | | | | | | | | | | | | | |
| 53. | A. fumigatus_XP_750255.1_Aspergillus_fumigatus_FUNGI_Non-P | | | | | | | | | | | | | | | |
| 54. | A. terreus_XP_001211750.1_Aspergillus_terreus_FUNGI_Non-P | | | | | | | | | | | | | | | |
| 55. | G. zeae_XP_381537.1_Gibberella_zeae_FUNGI_Non-P | | | | | | | | | | | | | | | |
| 56. | A. gossypii_NP_986457.1_AGL210Cp_Ashbya_gossypii_FUNGI_Non-P | | | | | | | | | | | | | | | |
| 57. | C. glabrata_XP_447163.1_Candida_glabrata_FUNGI_Non-P | | | | | | | | | | | | | | | |
| 58. | C. albicans_EAK98116.1_Candida_albicans_FUNGI_Non-P | | | | | | | | | | | | | | | |
| 59. | D. hansenii_XP_460636.1_Debaryomyces_hansenii_FUNGI_Non-P | | | | | | | | | | | | | | | |
| 60. | P. stipitis_XP_001384951.1_Pichia_stipitis_FUNGI_Non-P | | | | | | | | | | | | | | | |
| 61. | S. pombe_NP_588085.2_Schizosaccharomyces_pombe_FUNGI_Non-P | | | | | | | | | | | | | | | |
| 62. | D. melanogasterNP_610501.1_Drosophila_melanogaster_INSECT_Non-P | | | | | | | | | | | | | | | |
| 63. | D. simulans_XP_002080776.1_GD10665_Drosophila_simulans_INSECT_Non-P | | | | | | | | | | | | | | | |
| 64. | Drosophila_yakuba_XP_002089810.1_Drosophila_yakuba_INSECT_Non-P | | | | | | | | | | | | | | | |
| 65. | D. pseudoobscura_XP_001361569.2_Drosophila_pseudoobscura_pseudoobscura_INSECT_Non-P | | | | | | | | | | | | | | | |
| 66. | T. castaneum_XP_972457.1_similar_to_Tribolium_castaneum_INSECT_Non-P | | | | | | | | | | | | | | | |
| 67. | H. sapiens_NP_000365.3_Homo_sapiens_HUMAN_Non-P | | | | | | | | | | | | | | | |
| 68. | D. discoideum_XP_629682.1_Dictyostelium_discoideum_PROTOZOA_Non-P | | | | | | | | | | | | | | | |
| 69. | P. berghei_CAH96991.1_putative_Plasmodium_berghei_PROTOZOA_Non-P | | | | | | | | | | | | | | | |
| 70. | P. chabaudi_CAH75805.1_putative_Plasmodium_chabaudi_chabaudi_PROTOZOA_Non-P | | | | | | | | | | | | | | | |
| 71. | P. falciparum_XP_966063.1_Plasmodium_falciparum_PROTOZOA_Non-P | | | | | | | | | | | | | | | |
| 72. | Plasmodium_vivax_XP_001616097.1_Plasmodium_vivax_PROTOZOA_Non-P | | | | | | | | | | | | | | | |
| | | 16 | 17 | 18 | 19 | 20 | 21 | 22 | 23 | 24 | 25 | 26 | 27 | 28 | 29 | 30 |
| 1. | H. vulgare_TC175532#1_SPT_HEM1 | 47.1 | 44.3 | 45 | 48.8 | 47.8 | 47 | 50.5 | 49.3 | 47.8 | 50.4 | 48.3 | 49.2 | 47.8 | 47.7 | 48.4 |
| 2. | S. bicolor_Sb03g028330.1#1_SPT_HEM1 | 47.6 | 44.2 | 44.9 | 48.2 | 49.3 | 47.2 | 49.6 | 49.6 | 49.3 | 50.5 | 49.3 | 49.4 | 48.2 | 49.5 | 49.4 |
| 3. | Z. mays_ZM07MC20070_BFb0115I19@20019#1_SPT_HEM1 | 48 | 44.4 | 45.1 | 48.2 | 49.5 | 46.9 | 49.8 | 49 | 48.5 | 49.8 | 48.5 | 49.5 | 48.3 | 49.1 | 48.7 |
| 4. | O. sativa_LOC_Os01g43390.1#1_SPT_HEM1 | 47.3 | 45.7 | 46.4 | 49.4 | 50 | 48.1 | 50.6 | 49.3 | 48.9 | 49.9 | 49.3 | 50.7 | 48.9 | 48.9 | 48.9 |
| 5. | A. thaliana_AT3G14930.1#1_SPT_HEM1 | 45.8 | 42.7 | 43.4 | 47.1 | 47 | 48.7 | 47.5 | 46.3 | 46.1 | 47.3 | 48.4 | 49.2 | 47.3 | 46.8 | 46.2 |
| 6. | B. napus_TC76241#1_SPT_HEM1 | 45 | 43.3 | 43.1 | 48 | 48.1 | 48.8 | 47.8 | 47.2 | 45.9 | 47.8 | 47.8 | 48.6 | 47.4 | 47.4 | 46.9 |
| 7. | M. truncatula_AC119409_9.4#1_SPT_HEM1 | 43.9 | 42.2 | 42.6 | 47.7 | 48.8 | 47.8 | 48.4 | 50 | 49.2 | 48.9 | 49.1 | 50.1 | 48.8 | 48 | 47.7 |
| 8. | G. max_Glyma12g35880.2#1_SPT_HEM1 | 44.4 | 42 | 42.7 | 46.3 | 48.1 | 47.9 | 48.4 | 48.3 | 47.8 | 46.9 | 48.3 | 47.8 | 48.8 | 47.3 | 47.5 |
| 9. | G. max_Glyma13g34500.2#1_SPT_HEM1 | 34.7 | 38.6 | 39.7 | 36.3 | 37.3 | 37.6 | 37 | 38 | 37.5 | 36.7 | 37.6 | 38.1 | 37.5 | 37.4 | 36.6 |
| 10. | P. trichocarpa_URO-D_Poplus_trichocarpa_SPT_HEM1 | 43.8 | 42.4 | 42.2 | 47.7 | 48.3 | 47.3 | 47.6 | 47.8 | 48.1 | 46.4 | 47.5 | 46.6 | 49.8 | 47.4 | 48.2 |
| 11. | V. vinifera_GSVIVT00027816001#1_SPT_HEM1 | 43.9 | 42.3 | 42.3 | 47.7 | 47.8 | 46.6 | 46.6 | 47.4 | 47.2 | 47.3 | 48.6 | 48 | 48.6 | 46.6 | 47.3 |
| 12. | Aquilegia_sp_TC24505#1_SPT_HEM1 | 44.7 | 43.5 | 44.4 | 48.1 | 49 | 48.6 | 48.8 | 47.6 | 48.6 | 48.3 | 50.5 | 50 | 48.1 | 46.7 | 47.1 |
| 13. | S. lycopersicum_TC195523#1_SPT_HEM1 | 44.1 | 41.6 | 41.8 | 46.2 | 46.3 | 46.3 | 46.3 | 46.6 | 46.6 | 45.6 | 47.2 | 48.2 | 48 | 45.9 | 45.8 |
| 14. | C. reinhardtii_186446#1_CHL_HEM1 | 50.6 | 48.1 | 49.6 | 50.2 | 50.8 | 52.4 | 51.9 | 52.4 | 51 | 52.5 | 51.8 | 52.5 | 52.7 | 53.1 | 51.7 |
| 15. | C. vulgaris_61627#1_CHL_HEM2 | 61.4 | 59.8 | 60.6 | 58.8 | 59.3 | 59.3 | 59.4 | 59.4 | 57.5 | 57.8 | 58.3 | 59.5 | 59.9 | 58.2 | 57.6 |
| 16. | Chlorella_32323#1_CHL_HEM2 | | 52.5 | 53 | 55.4 | 54.9 | 55.6 | 56.3 | 55.1 | 55 | 54.9 | 55.1 | 56.3 | 54.3 | 57.6 | 56.1 |
| 17. | O. lucimarinus_17656#1_CHL_HEM2 | | | 92.3 | 55.3 | 56 | 55.4 | 55.3 | 53.5 | 52.7 | 54 | 54 | 53.6 | 54.8 | 53.8 | 53.3 |
| 18. | O. taurii_13162#1_CHL_HEM2 | | | | 54.3 | 55 | 55.2 | 55.3 | 54.3 | 53.5 | 54.8 | 54.5 | 54.4 | 55.6 | 54.9 | 54.3 |
| 19. | A. thaliana_AT2G40490.1#1_SPT_HEM2 | | | | | 93.7 | 78.2 | 78.7 | 78.5 | 76 | 78.5 | 77.2 | 77.9 | 76.6 | 74.4 | 74.9 |
| 20. | B. napus_TC68105#1_SPT_HEM2 | | | | | | 78.4 | 79.5 | 80.1 | 77.2 | 79 | 78.8 | 79.5 | 77 | 74.5 | 74.9 |
| 21. | C. sinensis_TC316#1_SPT_HEM2 | | | | | | | 84.8 | 83.5 | 79.9 | 82.3 | 81.1 | 81.7 | 81.7 | 77.5 | 74.4 |
| 22. | G. hirsutum_TC101219#1_SPT_HEM2 | | | | | | | | 84.4 | 81.2 | 82.9 | 82.6 | 84.4 | 82.7 | 75.7 | 76.2 |
| 23. | G. max_Glyma18g02490.1#1_SPT_HEM2 | | | | | | | | | 87.9 | 82.6 | 81.6 | 82.5 | 81.1 | 77 | 75.6 |
| 24. | M. truncatula_AC149472_12.4#1_SPT_HEM2 | | | | | | | | | | 80.6 | 80.2 | 82.3 | 82.8 | 75.2 | 73.6 |
| 25. | M. domestica_TC16580#1_SPT_HEM2 | | | | | | | | | | | 80.7 | 81.3 | 81.3 | 77.8 | 76.7 |
| 26. | N. tabacum_TC14277#1_SPT_HEM2 | | | | | | | | | | | | 90.8 | 83.9 | 76.5 | 75.4 |
| 27. | S. lycopersicum_TC209939#1_SPT_HEM2 | | | | | | | | | | | | | 84 | 76.8 | 74.9 |
| 28. | O. basilicum_TA2234_39350#1_SPT_HEM2 | | | | | | | | | | | | | | 76.1 | 74.7 |
| 29. | O. sativa_LOC_Os03g21900.1#1_SPT_HEM2 | | | | | | | | | | | | | | | 91.6 |
| 30. | S. bicolor_Sb01g036030.1#1_SPT_HEM2 | | | | | | | | | | | | | | | |
| 31. | P. taeda_TA15428_3352#1_SPT_HEM2 | | | | | | | | | | | | | | | |
| 32. | P. patens_188035#1_SPT_HEM2 | | | | | | | | | | | | | | | |
| 33. | S. moellendorffii_438672#1_SPT_HEM2 | | | | | | | | | | | | | | | |
| 34. | Cyanothece_sp._YP_001804380.1_Cyanothece_sp._BAC_Cyano | | | | | | | | | | | | | | | |
| 35. | Synechocystis_sp._NP_442753.1_Synechocystis_sp._BAC_Cyano | | | | | | | | | | | | | | | |
| 36. | Cyanothece_sp._YP_002373141.1_Cyanothece_sp._BAC_Cyano | | | | | | | | | | | | | | | |
| 37. | Cyanothece_sp._YP_002377951.1_BAC_Cyano | | | | | | | | | | | | | | | |
| 38. | M. aeruginosa_YP_001658143.1_Microcystis_aeruginosa_BAC_Cyano | | | | | | | | | | | | | | | |
| 39. | Synechococcus_sp._YP_001734083.1_Synechococcus_sp._BAC_Cyano | | | | | | | | | | | | | | | |
| 40. | T. erythraeum_YP_721451.1_Trichodesmium_erythraeum_BAC_Cyano | | | | | | | | | | | | | | | |
| 41. | P. marinus_YP_001014466.1_Prochlorococcus_marinus_BAC_Cyano | | | | | | | | | | | | | | | |
| 42. | P. marinus_YP_291214.1_Prochlorococcus_marinus_BAC_Cyano | | | | | | | | | | | | | | | |
| 43. | Synechococcus_sp._YP_376928.1_Synechococcus_sp._BAC_Cyano | | | | | | | | | | | | | | | |
| 44. | C. reinhardtii_195818#1_CHL_Others | | | | | | | | | | | | | | | |
| 45. | C. vulgaris_25726#1_CHL_Others | | | | | | | | | | | | | | | |
| 46. | O. lucimarinus_28976#1_CHL_Others | | | | | | | | | | | | | | | |
| 47. | O. RCC809_53774#1_CHL_Others | | | | | | | | | | | | | | | |
| 48. | O. taurii_14772#1_CHL_Others | | | | | | | | | | | | | | | |
| 49. | P. patens_112870#1_SPT_Others | | | | | | | | | | | | | | | |
| 50. | A. anophagefferens_30614#1_STR_Others | | | | | | | | | | | | | | | |
| 51. | P. tricornutum_20757#1_STR_Others | | | | | | | | | | | | | | | |
| 52. | T. pseudonana_3974#1_STR_Others | | | | | | | | | | | | | | | |
| 53. | A. fumigatus_XP_750255.1_Aspergillus_fumigatus_FUNGI_Non-P | | | | | | | | | | | | | | | |
| 54. | A. terreus_XP_001211750.1_Aspergillus_terreus_FUNGI_Non-P | | | | | | | | | | | | | | | |
| 55. | G. zeae_XP_381537.1_Gibberella_zeae_FUNGI_Non-P | | | | | | | | | | | | | | | |
| 56. | A. gossypii_NP_986457.1_AGL210Cp_Ashbya_gossypii_FUNGI_Non-P | | | | | | | | | | | | | | | |
| 57. | C. glabrata_XP_447163.1_Candida_glabrata_FUNGI_Non-P | | | | | | | | | | | | | | | |
| 58. | C. albicans_EAK98116.1_Candida_albicans_FUNGI_Non-P | | | | | | | | | | | | | | | |
| 59. | D. hansenii_XP_460636.1_Debaryomyces_hansenii_FUNGI_Non-P | | | | | | | | | | | | | | | |
| 60. | P. stipitis_XP_001384951.1_Pichia_stipitis_FUNGI_Non-P | | | | | | | | | | | | | | | |
| 61. | S. pombe_NP_588085.2_Schizosaccharomyces_pombe_FUNGI_Non-P | | | | | | | | | | | | | | | |
| 62. | D. melanogasterNP_610501.1_Drosophila_melanogaster_INSECT_Non-P | | | | | | | | | | | | | | | |
| 63. | D. simulans_XP_002080776.1_GD10665_Drosophila_simulans_INSECT_Non-P | | | | | | | | | | | | | | | |
| 64. | Drosophila_yakuba_XP_002089810.1_Drosophila_yakuba_INSECT_Non-P | | | | | | | | | | | | | | | |
| 65. | D. pseudoobscura_XP_001361569.2_Drosophila_pseudoobscura_pseudoobscura_INSECT_Non-P | | | | | | | | | | | | | | | |
| 66. | T. castaneum_XP_972457.1_similar_to_Tribolium_castaneum_INSECT_Non-P | | | | | | | | | | | | | | | |
| 67. | H. sapiens_NP_000365.3_Homo_sapiens_HUMAN_Non-P | | | | | | | | | | | | | | | |
| 68. | D. discoideum_XP_629682.1_Dictyostelium_discoideum_PROTOZOA_Non-P | | | | | | | | | | | | | | | |
| 69. | P. berghei_CAH96991.1_putative_Plasmodium_berghei_PROTOZOA_Non-P | | | | | | | | | | | | | | | |
| 70. | P. chabaudi_CAH75805.1_putative_Plasmodium_chabaudi_chabaudi_PROTOZOA_Non-P | | | | | | | | | | | | | | | |
| 71. | P. falciparum_XP_966063.1_Plasmodium_falciparum_PROTOZOA_Non-P | | | | | | | | | | | | | | | |
| 72. | Plasmodium_vivax_XP_001616097.1_Plasmodium_vivax_PROTOZOA_Non-P | | | | | | | | | | | | | | | |
| | | 31 | 32 | 33 | 34 | 35 | 36 | 37 | 38 | 39 | 40 | 41 | 42 | 43 | 44 | 45 |
| 1. | H. vulgare_TC175532#1_SPT_HEM1 | 48.3 | 47.4 | 46.4 | 45.8 | 44.3 | 46.8 | 46.8 | 45.8 | 45.5 | 48.3 | 46 | 45.5 | 45.8 | 42.4 | 44.2 |
| 2. | S. bicolor_Sb03g028330.1#1_SPT_HEM1 | 48 | 47.9 | 46.6 | 45.9 | 43.7 | 45.9 | 47.4 | 45.9 | 45.4 | 47.9 | 46.4 | 45.9 | 47.2 | 42 | 43.3 |
| 3. | Z. mays_ZM07MC20070_BFb0115I19@20019#1_SPT_HEM1 | 48 | 47.7 | 46.1 | 46.6 | 43.9 | 46.4 | 47.1 | 46.4 | 44.6 | 48.1 | 46.4 | 45.9 | 46.4 | 42.2 | 43.6 |
| 4. | O. sativa_LOC_Os01g43390.1#1_SPT_HEM1 | 49.5 | 47.2 | 47.1 | 47.1 | 44.2 | 46.9 | 47.4 | 45.9 | 45.7 | 48.1 | 46.7 | 46.2 | 47.1 | 42.8 | 42.5 |
| 5. | A. thaliana_AT3G14930.1#1_SPT_HEM1 | 46.5 | 48.7 | 45.6 | 46.3 | 44.9 | 46.3 | 46.8 | 45.6 | 45.1 | 45.1 | 44.6 | 44.2 | 43.9 | 41.9 | 43.2 |
| 6. | B. napus_TC76241#1_SPT_HEM1 | 46.4 | 49.5 | 46.1 | 46.2 | 45 | 45.5 | 46.9 | 46.2 | 45.7 | 45.2 | 44.7 | 44.3 | 45 | 40.6 | 43 |
| 7. | M. truncatula_AC119409_9.4#1_SPT_HEM1 | 48.2 | 47.9 | 47.2 | 46.1 | 45.1 | 46.1 | 47.5 | 45.8 | 46.8 | 48 | 47.2 | 47.4 | 48.8 | 43.2 | 41.6 |
| 8. | G. max_Glyma12g35880.2#1_SPT_HEM1 | 47.8 | 47.4 | 47.7 | 46.3 | 46.1 | 46.3 | 46.8 | 45.4 | 46.8 | 47.3 | 46.8 | 46.8 | 48 | 44.8 | 42.7 |
| 9. | G. max_Glyma13g34500.2#1_SPT_HEM1 | 37.1 | 35.1 | 36.4 | 41.2 | 40.4 | 41.2 | 41.9 | 40.7 | 40.9 | 43.1 | 42.3 | 42.5 | 43.4 | 35.8 | 35.6 |
| 10. | P. trichocarpa_URO-D_Poplus_trichocarpa_SPT_HEM1 | 47.7 | 46.7 | 44.7 | 45.6 | 44.6 | 45.3 | 46.1 | 45.1 | 45.8 | 47.1 | 46.3 | 46.3 | 47.1 | 43 | 43.1 |
| 11. | V. vinifera_GSVIVT00027816001#1_SPT_HEM1 | 46.6 | 44.6 | 45.5 | 47 | 44.8 | 45.8 | 47.5 | 44.8 | 46 | 48 | 46.8 | 46.8 | 47 | 42.2 | 42.5 |
| 12. | Aquilegia_sp_TC24505#1_SPT_HEM1 | 48.4 | 48.2 | 47.3 | 45.9 | 44.7 | 44.9 | 46.4 | 44.2 | 45.4 | 45.9 | 46.4 | 45.9 | 46.4 | 41.6 | 42.2 |
| 13. | S. lycopersicum_TC195523#1_SPT_HEM1 | 46.1 | 46.5 | 45.8 | 44.2 | 44.2 | 44.9 | 45.1 | 42.8 | 44.7 | 44.9 | 45.6 | 45.1 | 46.6 | 40.6 | 39.8 |
| 14. | C. reinhardtii_186446#1_CHL_HEM1 | 51.1 | 50.6 | 51.4 | 49.4 | 49.1 | 49.6 | 50.6 | 48.1 | 49.9 | 47.8 | 47.3 | 47.3 | 49.1 | 41.8 | 43.6 |
| 15. | C. vulgaris_61627#1_CHL_HEM2 | 59.8 | 59.3 | 61.5 | 59.9 | 58.7 | 58 | 58.4 | 57 | 58.4 | 56.6 | 55 | 55 | 57.7 | 39.3 | 41.3 |
| 16. | Chlorella_32323#1_CHL_HEM2 | 54.5 | 58.4 | 56.8 | 50.4 | 49.5 | 47.1 | 50.8 | 50.8 | 50.3 | 47.9 | 49.6 | 49.4 | 50.4 | 41.7 | 43.4 |
| 17. | O. lucimarinus_17656#1_CHL_HEM2 | 55.2 | 54.5 | 55 | 54.8 | 55.7 | 53.7 | 56.4 | 55.4 | 55.1 | 54.2 | 52.6 | 52.3 | 55.1 | 41 | 41.3 |
| 18. | O. taurii_13162#1_CHL_HEM2 | 54.7 | 54.3 | 54.5 | 54.2 | 55.1 | 53.4 | 55 | 53.7 | 54 | 53.1 | 51.4 | 51.1 | 53.1 | 41.5 | 41.8 |
| 19. | A. thaliana_AT2G40490.1#1_SPT_HEM2 | 71.9 | 66.4 | 67.8 | 54.3 | 52.3 | 52.3 | 52.6 | 52.5 | 53 | 53.3 | 52 | 51.8 | 54 | 41.7 | 41.7 |
| 20. | B. napus_TC68105#1_SPT_HEM2 | 72.3 | 65.7 | 68.6 | 54.9 | 52.9 | 52.9 | 53 | 52.7 | 53.7 | 53.9 | 52.9 | 52.6 | 54.7 | 41.6 | 41.9 |
| 21. | C. sinensis_TC316#1_SPT_HEM2 | 74.4 | 65.7 | 68.7 | 56.4 | 54.9 | 53.8 | 55 | 54.4 | 57 | 53.1 | 53.3 | 53.3 | 55.1 | 41.1 | 42.9 |
| 22. | G. hirsutum_TC101219#1_SPT_HEM2 | 73.3 | 66.7 | 68 | 56 | 55 | 52.9 | 53.8 | 53.7 | 56 | 53.2 | 53.4 | 53.2 | 56 | 41.5 | 42.4 |
| 23. | G. max_Glyma18g02490.1#1_SPT_HEM2 | 71.9 | 65.2 | 66.9 | 55.5 | 55 | 53.4 | 54.1 | 52.7 | 55.8 | 52.9 | 54.2 | 54.2 | 55.5 | 42.5 | 42.1 |
| 24. | M. truncatula_AC149472_12.4#1_SPT_HEM2 | 71.1 | 62.8 | 66.5 | 54.7 | 54.2 | 53.2 | 53.3 | 52.2 | 54.5 | 50.4 | 53.7 | 53.9 | 54.2 | 42.5 | 42.9 |
| 25. | M. domestica_TC16580#1_SPT_HEM2 | 73.9 | 66.2 | 67.2 | 54.2 | 52.5 | 51.5 | 52.9 | 52.3 | 52.5 | 51.5 | 52 | 52.2 | 53.2 | 42.8 | 43.3 |
| 26. | N. tabacum_TC14277#1_SPT_HEM2 | 73.4 | 66 | 66.2 | 53.7 | 53.7 | 53.7 | 52.8 | 51.9 | 53.9 | 52.4 | 53.7 | 53.4 | 54.7 | 41.8 | 42.6 |
| 27. | S. lycopersicum_TC209939#1_SPT_HEM2 | 73.1 | 66.7 | 66.9 | 55.1 | 54.4 | 53.3 | 53.7 | 52.6 | 54.9 | 52.5 | 55.3 | 55.1 | 55.6 | 41.6 | 41.4 |
| 28. | O. basilicum_TA2234_39350#1_SPT_HEM2 | 73.7 | 65.9 | 68.3 | 54.5 | 54.5 | 53.7 | 54.6 | 54.2 | 55.3 | 53.4 | 54.5 | 55 | 55.5 | 42.2 | 41.7 |
| 29. | O. sativa_LOC_Os03g21900.1#1_SPT_HEM2 | 73 | 64.7 | 66.3 | 54.5 | 52.8 | 52.5 | 53.9 | 53.1 | 53.8 | 52.8 | 54 | 54 | 53.5 | 40.4 | 41.3 |
| 30. | S. bicolor_Sb01g036030.1#1_SPT_HEM2 | 72.4 | 65.2 | 66.8 | 54.3 | 52.8 | 53 | 53.9 | 51.5 | 53.5 | 54.3 | 52.3 | 52.3 | 53 | 42 | 42.3 |
| 31. | P. taeda_TA15428_3352#1_SPT_HEM2 | | 65.2 | 69.8 | 54.9 | 53.9 | 52.4 | 54.2 | 53.9 | 55.7 | 54.4 | 53.4 | 53.4 | 54.4 | 42.5 | 42.4 |
| 32. | P. patens_188035#1_SPT_HEM2 | | | 69.6 | 56.8 | 55.2 | 53.5 | 55.5 | 53.8 | 54.5 | 51.6 | 50.8 | 50.6 | 52.5 | 41 | 43 |
| 33. | S. moellendorffii_438672#1_SPT_HEM2 | | | | 59.4 | 56.7 | 57.9 | 55.5 | 55.9 | 57 | 54.6 | 53.1 | 53.1 | 54.6 | 43.8 | 43.2 |
| 34. | Cyanothece_sp._YP_001804380.1_Cyanothece_sp._BAC_Cyano | | | | | 86.4 | 86.2 | 83.6 | 80.5 | 82.2 | 74 | 69.2 | 69.2 | 69.2 | 46.5 | 47.8 |
| 35. | Synechocystis_sp._NP_442753.1_Synechocystis_sp._BAC_Cyano | | | | | | 81.6 | 82.7 | 82.9 | 83.4 | 72.9 | 68.6 | 68.6 | 68.9 | 47 | 47.3 |
| 36. | Cyanothece_sp._YP_002373141.1_Cyanothece_sp._BAC_Cyano | | | | | | | 80.8 | 78.5 | 76.3 | 72.6 | 66.7 | 66.7 | 65 | 46.8 | 47.3 |
| 37. | Cyanothece_sp._YP_002377951.1_BAC_Cyano | | | | | | | | 87 | 79.9 | 72 | 66.7 | 66.7 | 67.2 | 44 | 46.6 |
| 38. | M. aeruginosa_YP_001658143.1_Microcystis_aeruginosa_BAC_Cyano | | | | | | | | | 80 | 70.6 | 65.5 | 65.8 | 66.7 | 44.5 | 46.9 |
| 39. | Synechococcus_sp._YP_001734083.1_Synechococcus_sp._BAC_Cyano | | | | | | | | | | 71.5 | 68.1 | 68.1 | 68.9 | 47.3 | 46.9 |
| 40. | T. erythraeum_YP_721451.1_Trichodesmium_erythraeum_BAC_Cyano | | | | | | | | | | | 63.3 | 63.3 | 65.8 | 45.5 | 44.4 |
| 41. | P. marinus_YP_001014466.1_Prochlorococcus_marinus_BAC_Cyano | | | | | | | | | | | | 98.6 | 81.8 | 41.5 | 44 |
| 42. | P. marinus_YP_291214.1_Prochlorococcus_marinus_BAC_Cyano | | | | | | | | | | | | | 81.8 | 41.5 | 43.7 |
| 43. | Synechococcus_sp._YP_376928.1_Synechococcus_sp._BAC_Cyano | | | | | | | | | | | | | | 44.3 | 44.4 |
| 44. | C. reinhardtii_195818#1_CHL_Others | | | | | | | | | | | | | | | 58 |
| 45. | C. vulgaris_25726#1_CHL_Others | | | | | | | | | | | | | | | |
| 46. | O. lucimarinus_28976#1_CHL_Others | | | | | | | | | | | | | | | |
| 47. | O. RCC809_53774#1_CHL_Others | | | | | | | | | | | | | | | |
| 48. | O. taurii_14772#1_CHL_Others | | | | | | | | | | | | | | | |
| 49. | P. patens_112870#1_SPT_Others | | | | | | | | | | | | | | | |
| 50. | A. anophagefferens_30614#1_STR_Others | | | | | | | | | | | | | | | |
| 51. | P. tricornutum_20757#1_STR_Others | | | | | | | | | | | | | | | |
| 52. | T. pseudonana_3974#1_STR_Others | | | | | | | | | | | | | | | |
| 53. | A. fumigatus_XP_750255.1_Aspergillus_fumigatus_FUNGI_Non-P | | | | | | | | | | | | | | | |
| 54. | A. terreus_XP_001211750.1_Aspergillus_terreus_FUNGI_Non-P | | | | | | | | | | | | | | | |
| 55. | G. zeae_XP_381537.1_Gibberella_zeae_FUNGI_Non-P | | | | | | | | | | | | | | | |
| 56. | A. gossypii_NP_986457.1_AGL210Cp_Ashbya_gossypii_FUNGI_Non-P | | | | | | | | | | | | | | | |
| 57. | C. glabrata_XP_447163.1_Candida_glabrata_FUNGI_Non-P | | | | | | | | | | | | | | | |
| 58. | C. albicans_EAK98116.1_Candida_albicans_FUNGI_Non-P | | | | | | | | | | | | | | | |
| 59. | D. hansenii_XP_460636.1_Debaryomyces_hansenii_FUNGI_Non-P | | | | | | | | | | | | | | | |
| 60. | P. stipitis_XP_001384951.1_Pichia_stipitis_FUNGI_Non-P | | | | | | | | | | | | | | | |
| 61. | S. pombe_NP_588085.2_Schizosaccharomyces_pombe_FUNGI_Non-P | | | | | | | | | | | | | | | |
| 62. | D. melanogasterNP_610501.1_Drosophila_melanogaster_INSECT_Non-P | | | | | | | | | | | | | | | |
| 63. | D. simulans_XP_002080776.1_GD10665_Drosophila_simulans_INSECT_Non-P | | | | | | | | | | | | | | | |
| 64. | Drosophila_yakuba_XP_002089810.1_Drosophila_yakuba_INSECT_Non-P | | | | | | | | | | | | | | | |
| 65. | D. pseudoobscura_XP_001361569.2_Drosophila_pseudoobscura_pseudoobscura_INSECT_Non-P | | | | | | | | | | | | | | | |
| 66. | T. castaneum_XP_972457.1_similar_to_Tribolium_castaneum_INSECT_Non-P | | | | | | | | | | | | | | | |
| 67. | H. sapiens_NP_000365.3_Homo_sapiens_HUMAN_Non-P | | | | | | | | | | | | | | | |
| 68. | D. discoideum_XP_629682.1_Dictyostelium_discoideum_PROTOZOA_Non-P | | | | | | | | | | | | | | | |
| 69. | P. berghei_CAH96991.1_putative_Plasmodium_berghei_PROTOZOA_Non-P | | | | | | | | | | | | | | | |
| 70. | P. chabaudi_CAH75805.1_putative_Plasmodium_chabaudi_chabaudi_PROTOZOA_Non-P | | | | | | | | | | | | | | | |
| 71. | P. falciparum_XP_966063.1_Plasmodium_falciparum_PROTOZOA_Non-P | | | | | | | | | | | | | | | |
| 72. | Plasmodium_vivax_XP_001616097.1_Plasmodium_vivax_PROTOZOA_Non-P | | | | | | | | | | | | | | | |
| | | 46 | 47 | 48 | 49 | 50 | 51 | 52 | 53 | 54 | 55 | 56 | 57 | 58 | 59 | 60 |
| 1. | H. vulgare_TC175532#1_SPT_HEM1 | 41.9 | 43.1 | 41.4 | 40.2 | 39.9 | 37.4 | 36.1 | 29 | 30 | 29.4 | 28.6 | 27.9 | 29 | 27.9 | 28.4 |
| 2. | S. bicolor_Sb03g028330.1#1_SPT_HEM1 | 41.4 | 43.6 | 41.1 | 41.1 | 39 | 36.9 | 36.1 | 29.7 | 31.8 | 30.3 | 28.3 | 28.1 | 28.9 | 27.8 | 28.5 |
| 3. | Z. mays_ZM07MC20070_BFb0115I19@20019#1_SPT_HEM1 | 41.5 | 42.8 | 41.4 | 41.2 | 39.8 | 36.7 | 36.6 | 30 | 31 | 31.1 | 28.3 | 27.8 | 28 | 27.8 | 28.8 |
| 4. | O. sativa_LOC_Os01g43390.1#1_SPT_HEM1 | 42.1 | 43.8 | 42.6 | 40.6 | 40 | 37.8 | 35.9 | 30.3 | 31.9 | 32.6 | 29.4 | 28.4 | 29.8 | 28.9 | 29.6 |
| 5. | A. thaliana_AT3G14930.1#1_SPT_HEM1 | 40.2 | 41.7 | 39.8 | 40 | 40 | 34.5 | 33.6 | 27.9 | 28.7 | 27.3 | 26.7 | 26 | 27.3 | 25.3 | 25.8 |
| 6. | B. napus_TC76241#1_SPT_HEM1 | 41.1 | 41.3 | 40.1 | 39.9 | 40 | 36.5 | 34.9 | 27.8 | 29.9 | 28 | 27.7 | 26.3 | 27.7 | 25.8 | 26.3 |
| 7. | M. truncatula_AC119409_9.4#1_SPT_HEM1 | 41.1 | 40.8 | 40.6 | 40.6 | 40.3 | 36.9 | 36.5 | 28.3 | 28.5 | 27.5 | 26.7 | 26.2 | 26.6 | 26.4 | 26.2 |
| 8. | G. max_Glyma12g35880.2#1_SPT_HEM1 | 40.5 | 40.8 | 40.4 | 40.6 | 40 | 35.9 | 35.6 | 28.1 | 29.6 | 28.3 | 27.5 | 25.6 | 27.1 | 25.8 | 26.3 |
| 9. | G. max_Glyma13g34500.2#1_SPT_HEM1 | 31.7 | 34 | 32.2 | 33.6 | 31.9 | 25.1 | 26.7 | 25.6 | 23.8 | 25.8 | 23.8 | 23.2 | 23.7 | 22.5 | 22.8 |
| 10. | P. trichocarpa_URO-D_Poplus_trichocarpa_SPT_HEM1 | 41.7 | 40.6 | 40.6 | 40.8 | 40.2 | 33.3 | 33.3 | 27.3 | 29.3 | 27.7 | 26.7 | 25.2 | 28.2 | 26.4 | 27.1 |
| 11. | V. vinifera_GSVIVT00027816001#1_SPT_HEM1 | 42.3 | 41.2 | 41.7 | 40.5 | 39.3 | 33.8 | 35 | 29.2 | 29.3 | 28.6 | 27.3 | 27.3 | 26.5 | 26.8 | 26.8 |
| 12. | Aquilegia_sp_TC24505#1_SPT_HEM1 | 41.9 | 41.4 | 41.4 | 39.7 | 39.3 | 34.2 | 35.9 | 27.9 | 28.8 | 28.3 | 26.8 | 26.8 | 26.2 | 26.3 | 27 |
| 13. | S. lycopersicum_TC195523#1_SPT_HEM1 | 40.4 | 39.8 | 41 | 38.5 | 39 | 35.1 | 36 | 28.6 | 29 | 27.4 | 25.6 | 25.3 | 26.2 | 25.6 | 25.4 |
| 14. | C. reinhardtii_186446#1_CHL_HEM1 | 45.9 | 44.7 | 43.7 | 41.1 | 41.2 | 39.2 | 39.2 | 32.6 | 34.6 | 33 | 31.9 | 29.5 | 29.9 | 30 | 30.7 |
| 15. | C. vulgaris_61627#1_CHL_HEM2 | 41.4 | 43.4 | 42.1 | 40.9 | 41.7 | 36.1 | 35.1 | 31.8 | 30.7 | 32.3 | 30.8 | 30 | 32.1 | 30 | 28.9 |
| 16. | Chlorella_32323#1_CHL_HEM2 | 43.2 | 44.8 | 41.6 | 41.2 | 42.1 | 38.2 | 38.4 | 31.1 | 31.4 | 30.1 | 30 | 29.6 | 31.2 | 29.7 | 30 |
| 17. | O. lucimarinus_17656#1_CHL_HEM2 | 43.9 | 46.6 | 43.7 | 39.2 | 41.3 | 35 | 36.1 | 33.2 | 30.8 | 31.1 | 32.9 | 32.7 | 32.8 | 34.1 | 33 |
| 18. | O. taurii_13162#1_CHL_HEM2 | 42.2 | 45.2 | 42.4 | 39.7 | 41 | 35.6 | 35.9 | 33.4 | 31.8 | 31.9 | 34.2 | 34.3 | 33.9 | 34.3 | 34.1 |
| 19. | A. thaliana_AT2G40490.1#1_SPT_HEM2 | 43 | 43.2 | 43.8 | 42.2 | 41.7 | 37.5 | 38.6 | 32.6 | 33.7 | 31.4 | 32.6 | 31.2 | 32.2 | 32.8 | 31.9 |
| 20. | B. napus_TC68105#1_SPT_HEM2 | 43.9 | 43.3 | 43.1 | 42.6 | 41.3 | 37 | 39 | 33.1 | 33.4 | 31.9 | 33.1 | 31.7 | 32.7 | 32.8 | 31.4 |
| 21. | C. sinensis_TC316#1_SPT_HEM2 | 45.1 | 45.3 | 43.5 | 43.9 | 41.8 | 36.6 | 37.9 | 32.8 | 34 | 30.8 | 32.8 | 32.8 | 31.4 | 31.8 | 31.3 |
| 22. | G. hirsutum_TC101219#1_SPT_HEM2 | 43.7 | 45.5 | 43.4 | 42.8 | 43 | 38.4 | 39.4 | 32.7 | 33.8 | 32 | 33.3 | 33 | 32.5 | 32.7 | 32.4 |
| 23. | G. max_Glyma18g02490.1#1_SPT_HEM2 | 43.3 | 44.4 | 44 | 43.3 | 41 | 36.6 | 39.9 | 33.2 | 33.5 | 32.3 | 34 | 33.3 | 32.3 | 33.9 | 33.2 |
| 24. | M. truncatula_AC149472_12.4#1_SPT_HEM2 | 43.1 | 44 | 45.1 | 42.6 | 41 | 37 | 39.9 | 33.7 | 34.8 | 32.6 | 33.6 | 33.3 | 31.6 | 33.3 | 32.5 |
| 25. | M. domestica_TC16580#1_SPT_HEM2 | 44.1 | 44.7 | 43.8 | 43.6 | 40.5 | 37 | 40.4 | 33.2 | 34 | 32 | 33.5 | 33.3 | 32.8 | 32.9 | 32.7 |
| 26. | N. tabacum_TC14277#1_SPT_HEM2 | 43.9 | 45.3 | 43.9 | 41.7 | 41.5 | 38 | 40 | 34.1 | 35.8 | 31.4 | 33.2 | 33.4 | 32.4 | 33.5 | 32.8 |
| 27. | S. lycopersicum_TC209939#1_SPT_HEM2 | 42.7 | 43.4 | 42.7 | 42.7 | 41.1 | 38 | 38.9 | 34.7 | 34.4 | 31.9 | 33.4 | 33.4 | 32.7 | 33.5 | 32.8 |
| 28. | O. basilicum_TA2234_39350#1_SPT_HEM2 | 43.9 | 45.7 | 44.7 | 43.1 | 41.6 | 37.2 | 40.1 | 35.4 | 35.6 | 32 | 33 | 33.5 | 33.5 | 33.1 | 32.2 |
| 29. | O. sativa_LOC_Os03g21900.1#1_SPT_HEM2 | 42.7 | 44.9 | 42.5 | 43.2 | 41.4 | 37 | 40.1 | 31.4 | 32.5 | 31.8 | 31.8 | 33 | 34 | 33.2 | 32.2 |
| 30. | S. bicolor_Sb01g036030.1#1_SPT_HEM2 | 41.5 | 43.9 | 41 | 41.7 | 42 | 38.2 | 40 | 32.1 | 33.1 | 31.5 | 31.7 | 32.2 | 32.9 | 32.4 | 31.1 |
| 31. | P. taeda_TA15428_3352#1_SPT_HEM2 | 44.6 | 46.5 | 44.2 | 42.1 | 43.3 | 38.4 | 41.4 | 33.1 | 34.2 | 32.2 | 30.9 | 32.2 | 32.9 | 32.8 | 32.1 |
| 32. | P. patens_188035#1_SPT_HEM2 | 44.4 | 43.6 | 43.4 | 39.7 | 44.8 | 39 | 39 | 30.8 | 31.6 | 30.3 | 31.8 | 30.2 | 29.8 | 29.8 | 29.3 |
| 33. | S. moellendorffii_438672#1_SPT_HEM2 | 45.8 | 47 | 46.2 | 43.2 | 44.8 | 38.4 | 41.8 | 32.9 | 34 | 31.8 | 32.8 | 31.8 | 32.6 | 33.4 | 32.7 |
| 34. | Cyanothece_sp._YP_001804380.1_Cyanothece_sp._BAC_Cyano | 48.7 | 51.3 | 47.7 | 48.7 | 44.1 | 40.4 | 43.2 | 33 | 31.3 | 33.4 | 33 | 32.8 | 34.3 | 32.2 | 32 |
| 35. | Synechocystis_sp._NP_442753.1_Synechocystis_sp._BAC_Cyano | 47.5 | 50.9 | 46.2 | 45.6 | 45 | 38.9 | 42.8 | 34.2 | 32.2 | 33.3 | 31.4 | 33.1 | 34 | 32.7 | 32.4 |
| 36. | Cyanothece_sp._YP_002373141.1_Cyanothece_sp._BAC_Cyano | 47.2 | 48.7 | 44.7 | 47.7 | 42.5 | 39.2 | 42.3 | 32.2 | 30.6 | 31.5 | 31.6 | 30.9 | 32.5 | 31.8 | 31.8 |
| 37. | Cyanothece_sp._YP_002377951.1_BAC_Cyano | 46.2 | 49.2 | 42.9 | 46.1 | 44.1 | 39.3 | 41.4 | 32.2 | 31.2 | 32.7 | 32.3 | 32.1 | 33.3 | 31.3 | 32.5 |
| 38. | M. aeruginosa_YP_001658143.1_Microcystis_aeruginosa_BAC_Cyano | 45.5 | 48.4 | 42.9 | 45.9 | 45.4 | 39.8 | 42.8 | 33.1 | 30.7 | 32.7 | 31.4 | 32.6 | 33.9 | 32.6 | 32.6 |
| 39. | Synechococcus_sp._YP_001734083.1_Synechococcus_sp._BAC_Cyano | 46.7 | 48.7 | 46.2 | 45.9 | 46.7 | 41.2 | 43.3 | 32.8 | 31.2 | 33.2 | 33.3 | 32.9 | 34.5 | 32.7 | 33.7 |
| 40. | T. erythraeum_YP_721451.1_Trichodesmium_erythraeum_BAC_Cyano | 44.9 | 46.8 | 42.9 | 44.8 | 45.2 | 38.8 | 42.3 | 33.8 | 30.3 | 30.5 | 31.4 | 32.2 | 32.2 | 31.4 | 32 |
| 41. | P. marinus_YP_001014466.1_Prochlorococcus_marinus_BAC_Cyano | 42.7 | 43.7 | 41.7 | 43.1 | 44.8 | 35.1 | 38.3 | 35.9 | 32.3 | 33.2 | 31.9 | 34.1 | 34.1 | 32.5 | 33.3 |
| 42. | P. marinus_YP_291214.1_Prochlorococcus_marinus_BAC_Cyano | 42.7 | 43.1 | 41.7 | 43.1 | 44.6 | 34.9 | 38.1 | 35.4 | 32.1 | 32.9 | 31.4 | 33.8 | 33.8 | 32 | 32.8 |
| 43. | Synechococcus_sp._YP_376928.1_Synechococcus_sp._BAC_Cyano | 44.2 | 45.2 | 41.9 | 43.8 | 45.8 | 35.6 | 38.6 | 34.6 | 31.8 | 33.9 | 32.7 | 32.5 | 31.9 | 31.8 | 31.3 |
| 44. | C. reinhardtii_195818#1_CHL_Others | 55.8 | 55.9 | 57.6 | 57.9 | 42.4 | 42.6 | 45.1 | 31.6 | 32 | 30.1 | 30 | 29.2 | 30.1 | 31.2 | 30 |
| 45. | C. vulgaris_25726#1_CHL_Others | 56.2 | 58.1 | 54.9 | 57.3 | 40.1 | 38.9 | 43.7 | 29.7 | 29.3 | 27 | 30.4 | 28.1 | 29.1 | 29.2 | 28.3 |
| 46. | O. lucimarinus_28976#1_CHL_Others | | 84.1 | 82.7 | 58.9 | 39.8 | 45.5 | 47.2 | 30.5 | 31.3 | 28.9 | 29.8 | 30.8 | 30.4 | 30.8 | 31 |
| 47. | O. RCC809_53774#1_CHL_Others | | | 79.5 | 60.9 | 42.3 | 42 | 48 | 32.1 | 32.3 | 31.5 | 32.5 | 34 | 32.6 | 33.2 | 33 |
| 48. | O. taurii_14772#1_CHL_Others | | | | 58.7 | 40 | 43.5 | 47.9 | 30.5 | 33.4 | 29.7 | 30.5 | 31.6 | 30.4 | 31.8 | 32.3 |
| 49. | P. patens_112870#1_SPT_Others | | | | | 36.2 | 41.8 | 43.9 | 30.4 | 31.4 | 29.8 | 31.2 | 31.7 | 30.8 | 31.4 | 30.9 |
| 50. | A. anophagefferens_30614#1_STR_Others | | | | | | 38.2 | 40.3 | 29.7 | 29.9 | 29.8 | 30.6 | 30.1 | 30.6 | 29.2 | 30 |
| 51. | P. tricornutum_20757#1_STR_Others | | | | | | | 67.8 | 26 | 28.2 | 26.6 | 26 | 26.2 | 24 | 25.1 | 24.4 |
| 52. | T. pseudonana_3974#1_STR_Others | | | | | | | | 28.6 | 29.3 | 27.6 | 27.2 | 28.9 | 26.2 | 26.9 | 27.1 |
| 53. | A. fumigatus_XP_750255.1_Aspergillus_fumigatus_FUNGI_Non-P | | | | | | | | | 81.6 | 72.7 | 62.1 | 61.6 | 59.7 | 60.1 | 62.3 |
| 54. | A. terreus_XP_001211750.1_Aspergillus_terreus_FUNGI_Non-P | | | | | | | | | | 67.6 | 58.2 | 56.9 | 56.6 | 56.5 | 58.3 |
| 55. | G. zeae_XP_381537.1_Gibberella_zeae_FUNGI_Non-P | | | | | | | | | | | 60.6 | 61 | 58 | 57.5 | 59.4 |
| 56. | A. gossypii_NP_986457.1_AGL210Cp_Ashbya_gossypii_FUNGI_Non-P | | | | | | | | | | | | 80.7 | 68.3 | 69.8 | 71.2 |
| 57. | C. glabrata_XP_447163.1_Candida_glabrata_FUNGI_Non-P | | | | | | | | | | | | | 72 | 71.6 | 73 |
| 58. | C. albicans_EAK98116.1_Candida_albicans_FUNGI_Non-P | | | | | | | | | | | | | | 78.8 | 82.4 |
| 59. | D. hansenii_XP_460636.1_Debaryomyces_hansenii_FUNGI_Non-P | | | | | | | | | | | | | | | 88.1 |
| 60. | P. stipitis_XP_001384951.1_Pichia_stipitis_FUNGI_Non-P | | | | | | | | | | | | | | | |
| 61. | S. pombe_NP_588085.2_Schizosaccharomyces_pombe_FUNGI_Non-P | | | | | | | | | | | | | | | |
| 62. | D. melanogasterNP_610501.1_Drosophila_melanogaster_INSECT_Non-P | | | | | | | | | | | | | | | |
| 63. | D. simulans_XP_002080776.1_GD10665_Drosophila_simulans_INSECT_Non-P | | | | | | | | | | | | | | | |
| 64. | Drosophila_yakuba_XP_002089810.1_Drosophila_yakuba_INSECT_Non-P | | | | | | | | | | | | | | | |
| 65. | D. pseudoobscura_XP_001361569.2_Drosophila_pseudoobscura_pseudoobscura_INSECT_Non-P | | | | | | | | | | | | | | | |
| 66. | T. castaneum_XP_972457.1_similar_to_Tribolium_castaneum_INSECT_Non-P | | | | | | | | | | | | | | | |
| 67. | H. sapiens_NP_000365.3_Homo_sapiens_HUMAN_Non-P | | | | | | | | | | | | | | | |
| 68. | D. discoideum_XP_629682.1_Dictyostelium_discoideum_PROTOZOA_Non-P | | | | | | | | | | | | | | | |
| 69. | P. berghei_CAH96991.1_putative_Plasmodium_berghei_PROTOZOA_Non-P | | | | | | | | | | | | | | | |
| 70. | P. chabaudi_CAH75805.1_putative_Plasmodium_chabaudi_chabaudi_PROTOZOA_Non-P | | | | | | | | | | | | | | | |
| 71. | P. falciparum_XP_966063.1_Plasmodium_falciparum_PROTOZOA_Non-P | | | | | | | | | | | | | | | |
| 72. | Plasmodium_vivax_XP_001616097.1_Plasmodium_vivax_PROTOZOA_Non-P | | | | | | | | | | | | | | | |

| | | 61 | 62 | 63 | 64 | 65 | 66 | 67 | 68 | 69 | 70 | 71 | 72 |
|---|---|---|---|---|---|---|---|---|---|---|---|---|---|
| 1. | H. vulgare_TC175532#1_SPT_HEM1 | 30.1 | 31.8 | 31.8 | 31.8 | 32 | 31.4 | 28.3 | 30.7 | 22.6 | 23.4 | 23.8 | 24.7 |
| 2. | S. bicolor_Sb03g028330.1#1_SPT_HEM1 | 30.5 | 32.7 | 32.7 | 32.7 | 32.2 | 31.9 | 28.5 | 29.9 | 23.2 | 24.1 | 23.6 | 26 |
| 3. | Z. mays_ZM07MC20070_BFb0115I19@20019#1_SPT_HEM1 | 30.6 | 33.3 | 33.3 | 33.3 | 33 | 31.3 | 28.3 | 29.7 | 22.8 | 23.8 | 24.1 | 25.3 |
| 4. | O. sativa_LOC_Os01g43390.1#1_SPT_HEM1 | 31.9 | 32.4 | 32.4 | 32.4 | 32.1 | 31.3 | 29.1 | 30 | 23.2 | 23.5 | 23.6 | 25.1 |
| 5. | A. thaliana_AT3G14930.1#1_SPT_HEM1 | 29.5 | 29.5 | 29.5 | 29.5 | 30.2 | 28.5 | 28.2 | 28.7 | 24.2 | 22.6 | 24.5 | 23.6 |
| 6. | B. napus_TC76241#1_SPT_HEM1 | 30.5 | 29.8 | 29.6 | 29.6 | 30.3 | 28.8 | 28.3 | 29.7 | 24.3 | 23.6 | 24.9 | 23.1 |
| 7. | M. truncatula_AC119409_9.4#1_SPT_HEM1 | 28.9 | 30.8 | 30.5 | 30.5 | 30.5 | 30 | 28.7 | 30.4 | 24.1 | 24.6 | 24 | 25.8 |
| 8. | G. max_Glyma12g35880.2#1_SPT_HEM1 | 30.6 | 33.3 | 33 | 33.3 | 33 | 31.6 | 28.8 | 29.5 | 23.5 | 24.8 | 23.8 | 26.1 |
| 9. | G. max_Glyma13g34500.2#1_SPT_HEM1 | 28.4 | 30 | 30 | 30 | 29.8 | 28.4 | 25.9 | 26.9 | 18.7 | 20.3 | 19 | 19.9 |
| 10. | P. trichocarpa_URO-D_Poplus_trichocarpa_SPT_HEM1 | 30.3 | 32 | 31.7 | 32 | 31.5 | 28.8 | 28.3 | 29.7 | 23.6 | 24.6 | 23.9 | 23.8 |
| 11. | V. vinifera_GSVIVT00027816001#1_SPT_HEM1 | 29.5 | 32.4 | 32.2 | 32.4 | 32.4 | 28.5 | 29.2 | 28.6 | 22.7 | 23.6 | 24.5 | 26.7 |
| 12. | Aquilegia_sp_TC24505#1_SPT_HEM1 | 30.8 | 32 | 31.7 | 31.7 | 31.5 | 27.9 | 27.1 | 28.8 | 23.6 | 22.8 | 23.6 | 24.4 |
| 13. | S. lycopersicum_TC195523#1_SPT_HEM1 | 29.2 | 30.8 | 30.5 | 30.5 | 30.3 | 27.7 | 26.5 | 27.6 | 24.5 | 23.4 | 23.8 | 25.3 |
| 14. | C. reinhardtii_186446#1_CHL_HEM1 | 32.8 | 32.8 | 32.8 | 32.8 | 33 | 30.9 | 30.7 | 32.4 | 23.5 | 24.9 | 23.9 | 25.6 |
| 15. | C. vulgaris_61627#1_CHL_HEM2 | 31.7 | 32.2 | 32.2 | 32.2 | 32.5 | 31.2 | 29.5 | 31.2 | 23.2 | 24.2 | 24.9 | 26 |
| 16. | Chlorella_32323#1_CHL_HEM2 | 31.8 | 33.9 | 33.9 | 33.7 | 33.9 | 28.2 | 30.6 | 29.9 | 25.7 | 25.4 | 24.5 | 27.3 |
| 17. | O. lucimarinus_17656#1_CHL_HEM2 | 35.9 | 33.8 | 33.8 | 33.5 | 34.1 | 30.9 | 30.7 | 34 | 25 | 26.1 | 25.9 | 24.6 |
| 18. | O. taurii_13162#1_CHL_HEM2 | 36 | 35.8 | 35.8 | 35.5 | 35.8 | 33.1 | 32.3 | 34 | 25.5 | 26.9 | 25.6 | 24.2 |
| 19. | A. thaliana_AT2G40490.1#1_SPT_HEM2 | 33.9 | 30.8 | 30.8 | 30.8 | 30.6 | 31.8 | 29.4 | 31.6 | 27.4 | 28.9 | 26.3 | 27.7 |
| 20. | B. napus_TC68105#1_SPT_HEM2 | 34.4 | 31.3 | 31.3 | 31.3 | 31.1 | 32 | 29.9 | 32.6 | 27.6 | 28.4 | 26.3 | 25.8 |
| 21. | C. sinensis_TC316#1_SPT_HEM2 | 34 | 32.7 | 32.7 | 32.7 | 32.7 | 32.7 | 31.3 | 34.5 | 24.1 | 25.7 | 25.4 | 27.7 |
| 22. | G. hirsutum_TC101219#1_SPT_HEM2 | 33.4 | 32.6 | 32.6 | 32.6 | 32.3 | 32.3 | 28.9 | 32.9 | 26.2 | 26.3 | 27.3 | 25.9 |
| 23. | G. max_Glyma18g02490.1#1_SPT_HEM2 | 33.8 | 31.6 | 31.6 | 31.6 | 31.9 | 33.1 | 29.9 | 33.2 | 28.1 | 26.7 | 29 | 25.9 |
| 24. | M. truncatula_AC149472_12.4#1_SPT_HEM2 | 33.8 | 31.5 | 31.5 | 31.5 | 31.2 | 33.2 | 30 | 32.5 | 25.8 | 26.1 | 27.6 | 25.7 |
| 25. | M. domestica_TC16580#1_SPT_HEM2 | 33.5 | 31.2 | 31.2 | 31.2 | 31.4 | 32.1 | 29.5 | 31.4 | 26.5 | 26 | 25.9 | 27 |
| 26. | N. tabacum_TC14277#1_SPT_HEM2 | 33.4 | 32.6 | 32.3 | 32.3 | 31.6 | 31.7 | 31.3 | 34.1 | 26.7 | 27.3 | 26.9 | 26.8 |
| 27. | S. lycopersicum_TC209939#1_SPT_HEM2 | 34.2 | 32.2 | 32 | 32 | 31.7 | 32 | 30.8 | 33.3 | 27.4 | 28.7 | 26.9 | 26.2 |
| 28. | O. basilicum_TA2234_39350#1_SPT_HEM2 | 35.3 | 33.1 | 33.1 | 33.1 | 32.3 | 31.3 | 31.4 | 33.4 | 26.2 | 27.1 | 27.6 | 26.3 |
| 29. | O. sativa_LOC_Os03g21900.1#1_SPT_HEM2 | 33.7 | 31.4 | 31.4 | 31.4 | 31.1 | 32.1 | 30.6 | 32.7 | 25.5 | 26.1 | 26.4 | 28.4 |
| 30. | S. bicolor_Sb01g036030.1#1_SPT_HEM2 | 32.4 | 30.6 | 30.6 | 30.6 | 30.3 | 31.8 | 30.3 | 32.3 | 25.3 | 27.3 | 26.8 | 27.1 |
| 31. | P. taeda_TA15428_3352#1_SPT_HEM2 | 35.1 | 31.8 | 31.8 | 31.8 | 31.8 | 30.7 | 29.1 | 31.6 | 26.9 | 27.3 | 27.4 | 27.8 |
| 32. | P. patens_188035#1_SPT_HEM2 | 31.4 | 30.8 | 30.5 | 30.5 | 30 | 29.8 | 30.6 | 32 | 26.7 | 26.3 | 24.6 | 28.5 |
| 33. | S. moellendorffii_438672#1_SPT_HEM2 | 36 | 33.6 | 33.6 | 33.6 | 33.3 | 33.1 | 31.1 | 32.4 | 25.3 | 25.8 | 25.2 | 27.5 |
| 34. | Cyanothece_sp._YP_001804380.1_Cyanothece_sp._BAC_Cyano | 38.4 | 34.1 | 33.8 | 34.1 | 34.3 | 31.8 | 34.2 | 33.1 | 23.8 | 25.8 | 25.1 | 25.6 |
| 35. | Synechocystis_sp._NP_442753.1_Synechocystis_sp._BAC_Cyano | 37.7 | 33.6 | 33.3 | 33.6 | 33.6 | 33 | 33.4 | 34.7 | 23.7 | 25.8 | 23.9 | 23.6 |
| 36. | Cyanothece_sp._YP_002373141.1_Cyanothece_sp._BAC_Cyano | 35.9 | 33.2 | 33 | 33.2 | 33.5 | 32.3 | 33.9 | 34.7 | 25.9 | 27.4 | 25.4 | 26.4 |
| 37. | Cyanothece_sp._YP_002377951.1_BAC_Cyano | 37.4 | 33.1 | 32.8 | 33.1 | 33.9 | 32.7 | 33.4 | 34.2 | 23.4 | 24.8 | 24.6 | 26.1 |
| 38. | M. aeruginosa_YP_001658143.1_Microcystis_aeruginosa_BAC_Cyano | 36.6 | 33.6 | 33.3 | 33.6 | 34.4 | 33 | 32.9 | 34.2 | 24.5 | 25.5 | 24.9 | 25.6 |
| 39. | Synechococcus_sp._YP_001734083.1_Synechococcus_sp._BAC_Cyano | 38.7 | 34.2 | 33.9 | 34.2 | 34.4 | 33.2 | 32.3 | 35 | 23.3 | 25.6 | 24.9 | 25.3 |
| 40. | T. erythraeum_YP_721451.1_Trichodesmium_erythraeum_BAC_Cyano | 36.4 | 32.7 | 32.4 | 32.7 | 32.4 | 32.3 | 32.2 | 33.1 | 26.3 | 26.8 | 26.5 | 25.4 |
| 41. | P. marinus_YP_001014466.1_Prochlorococcus_marinus_BAC_Cyano | 37.9 | 34.3 | 34.3 | 34.3 | 34.1 | 32.3 | 32.2 | 32.1 | 26.8 | 27 | 27.7 | 25.5 |
| 42. | P. marinus_YP_291214.1_Prochlorococcus_marinus_BAC_Cyano | 37.9 | 34.1 | 34.1 | 34.1 | 33.8 | 32.3 | 32 | 31.8 | 26.8 | 27.3 | 27.5 | 25.8 |
| 43. | Synechococcus_sp._YP_376928.1_Synechococcus_sp._BAC_Cyano | 37.2 | 35.4 | 35.2 | 35.4 | 35.7 | 32.8 | 31.2 | 31.4 | 26 | 27.2 | 27.2 | 26.5 |
| 44. | C. reinhardtii_195818#1_CHL_Others | 32 | 33.6 | 33.6 | 33.6 | 33.3 | 31.4 | 34.3 | 33.3 | 23.9 | 25.4 | 23.3 | 25.7 |
| 45. | C. vulgaris_25726#1_CHL_Others | 29.3 | 29.9 | 29.9 | 29.9 | 29.9 | 29.6 | 32.5 | 30.4 | 22.8 | 23.8 | 23.1 | 25.9 |
| 46. | O. lucimarinus_28976#1_CHL_Others | 33.3 | 34 | 34 | 34 | 33.3 | 29.3 | 34.3 | 33.5 | 24 | 24.8 | 26.4 | 27.2 |
| 47. | O. RCC809_53774#1_CHL_Others | 35.4 | 35.3 | 35.3 | 35.3 | 34 | 30.1 | 35.6 | 34.8 | 22.7 | 23.4 | 24.1 | 25.6 |
| 48. | O. taurii_14772#1_CHL_Others | 33.4 | 33.8 | 33.8 | 33.8 | 33.3 | 30.3 | 34.6 | 32 | 22.1 | 24.3 | 23.9 | 25.9 |
| 49. | P. patens_112870#1_SPT_Others | 34.3 | 34.4 | 34.4 | 34.4 | 34.2 | 31.8 | 35.7 | 33.8 | 23.9 | 24.6 | 23.1 | 26.8 |
| 50. | A. anophagefferens_30614#1_STR_Others | 30 | 30.8 | 30.8 | 30.8 | 31.5 | 31.3 | 31.1 | 30.8 | 27.1 | 25.6 | 25.7 | 24.4 |
| 51. | P. tricornutum_20757#1_STR_Others | 27.9 | 28.7 | 28.7 | 28.9 | 28.9 | 28.6 | 27.7 | 27.6 | 22.5 | 21.7 | 21.2 | 22.7 |
| 52. | T. pseudonana_3974#1_STR_Others | 31.1 | 30.1 | 30.1 | 30.1 | 30.6 | 28.4 | 30 | 27.8 | 22.7 | 22.7 | 24.3 | 22.6 |
| 53. | A. fumigatus_XP_750255.1_Aspergillus_fumigatus_FUNGI_Non-P | 55.6 | 47 | 47 | 47 | 46.4 | 47.4 | 48.4 | 45.9 | 27.8 | 29.9 | 28.4 | 26.9 |
| 54. | A. terreus_XP_001211750.1_Aspergillus_terreus_FUNGI_Non-P | 51.1 | 44.3 | 44.3 | 44.3 | 43.8 | 45.5 | 47.3 | 44.4 | 26.7 | 28.7 | 27.5 | 29.2 |
| 55. | G. zeae_XP_381537.1_Gibberella_zeae_FUNGI_Non-P | 55.2 | 47.3 | 47.3 | 47.3 | 46.7 | 46.7 | 48 | 43.6 | 27.6 | 29.9 | 28.3 | 27.3 |
| 56. | A. gossypii_NP_986457.1_AGL210Cp_Ashbya_gossypii_FUNGI_Non-P | 55.7 | 45.2 | 45.2 | 45.2 | 44.7 | 46.2 | 50.1 | 46.5 | 26 | 28.7 | 25.3 | 29.2 |
| 57. | C. glabrata_XP_447163.1_Candida_glabrata_FUNGI_Non-P | 59.6 | 46.6 | 46.6 | 46.6 | 46.3 | 47.1 | 50.1 | 48.1 | 28.4 | 30 | 28 | 29.3 |
| 58. | C. albicans_EAK98116.1_Candida_albicans_FUNGI_Non-P | 56.7 | 47.1 | 47.1 | 47.1 | 47.1 | 43.8 | 49.3 | 45.8 | 29.9 | 31.8 | 29.9 | 29.8 |
| 59. | D. hansenii_XP_460636.1_Debaryomyces_hansenii_FUNGI_Non-P | 53.9 | 47 | 47 | 47 | 46.2 | 43.4 | 48.3 | 46.8 | 29.9 | 32.9 | 29.9 | 29.5 |
| 60. | P. stipitis_XP_001384951.1_Pichia_stipitis_FUNGI_Non-P | 55.5 | 47.3 | 47.3 | 47.3 | 47.3 | 42.3 | 48.3 | 47.1 | 28.7 | 31.4 | 29.1 | 30 |
| 61. | S. pombe_NP_588085.2_Schizosaccharomyces_pombe_FUNGI_Non-P | | 52.2 | 52.2 | 52.2 | 51.6 | 51.2 | 51.1 | 47.7 | 27.4 | 29.3 | 27.4 | 27.8 |
| 62. | D. melanogasterNP_610501.1_Drosophila_melanogaster_INSECT_Non-P | | | 99.7 | 99.2 | 94.1 | 59.5 | 52 | 51.8 | 28.4 | 30.7 | 29.2 | 29.5 |
| 63. | D. simulans_XP_002080776.1_GD10665_Drosophila_simulans_INSECT_Non-P | | | | 99.2 | 94.4 | 59.5 | 52 | 51.8 | 28.4 | 30.7 | 29.2 | 29.5 |
| 64. | Drosophila_yakuba_XP_002089810.1_Drosophila_yakuba_INSECT_Non-P | | | | | 94.1 | 60.1 | 52 | 51.5 | 28.2 | 30.5 | 29.2 | 29.3 |
| 65. | D. pseudoobscura_XP_001361569.2_Drosophila_pseudoobscura_pseudoobscura_INSECT_Non-P | | | | | | 59.5 | 52 | 50.9 | 28.4 | 31.9 | 29 | 28.8 |
| 66. | T. castaneum_XP_972457.1_similar_to_Tribolium_castaneum_INSECT_Non-P | | | | | | | 52.4 | 47.3 | 26.8 | 29.6 | 29.5 | 28.1 |
| 67. | H. sapiens_NP_000365.3_Homo_sapiens_HUMAN_Non-P | | | | | | | | 55.6 | 25 | 28.3 | 26.4 | 32 |
| 68. | D. discoideum_XP_629682.1_Dictyostelium_discoideum_PROTOZOA_Non-P | | | | | | | | | 28.5 | 31.1 | 29.7 | 30.5 |
| 69. | P. berghei_CAH96991.1_putative_Plasmodium_berghei_PROTOZOA_Non-P | | | | | | | | | | 84 | 62 | 52 |
| 70. | P. chabaudi_CAH75805.1_putative_Plasmodium_chabaudi_chabaudi_PROTOZOA_Non-P | | | | | | | | | | | 60.2 | 52.5 |
| 71. | P. falciparum_XP_966063.1_Plasmodium_falciparum_PROTOZOA_Non-P | | | | | | | | | | | | 53.7 |
| 72. | Plasmodium_vivax_XP_001616097.1_Plasmodium_vivax_PROTOZOA_Non-P | | | | | | | | | | | | |

[0678] A MATGAT table for local alignment of a specific domain, or data on % identity/similarity between specific domains may also be included.

### 4. AS-MTT (Abiotic Stress Membrane Tethered Transcription Factor) Polypeptides

[0679] Results of the MATGAT analysis are shown in Table B4

TABLE B4

| | | 1 | 2 | 3 | 4 | 5 | 6 | 7 | 12 | 13 | 14 |
|---|---|---|---|---|---|---|---|---|---|---|---|
| 1. | A. comosus_DT336453#1 | | 72 | 74 | 86 | 86 | 70 | 70 | 67 | 65 | 65 |
| 2. | S. tuberosum_TC170010#1 | | | 84 | 67 | 67 | 72 | 72 | 81 | 74 | 77 |
| 3. | I. nil_TC6724#1 | | | | 70 | 70 | 74 | 74 | 84 | 74 | 77 |
| 4. | T. aestivum_TC297361#1 | | | | | 100 | 72 | 70 | 63 | 63 | 63 |
| 5. | H. vulgare_TC157185#1 | | | | | | 72 | 70 | 63 | 63 | 63 |
| 6. | S. officinarum_TC86637#1 | | | | | | | 98 | 72 | 67 | 70 |
| 7. | O. sativa_LOC_Os05g08980.1#1 | | | | | | | | 72 | 67 | 70 |
| 12. | H. annuus_TC32349#1 | | | | | | | | | 77 | 79 |
| 13. | P. trichocarpa_657115#1 | | | | | | | | | | 98 |

### 5. EXO-1 Polypeptide

[0680] Results of the software analysis are shown in Table B5 for the global similarity over the full length of the polypeptide sequences. The sequence similarity (in %) between the EXO-1 polypeptide sequences useful in performing the methods of the invention can be as low as 20% compared to SEQ ID NO: 763.

TABLE B5
MatGAT results for global similarity and identity over the full length of the polypeptide sequences.

| | 1 | 2 | 3 | 4 | 5 | 6 | 7 | 8 | 9 | 10 | 11 | 12 | 13 | 14 |
|---|---|---|---|---|---|---|---|---|---|---|---|---|---|---|
| 39. A. thaliana_AT1G18090.1_III | 30.3 | 47.5 | 23.4 | 30.6 | 23.5 | 24.8 | 25.3 | 24.6 | 28.3 | 51.4 | 22.5 | 22.1 | 27.9 | 25.8 |
| 40. A. thaliana_AT1G29630.2_III | 41.8 | 27.5 | 28 | 44.1 | 22 | 42.5 | 27.3 | 26.9 | 53.4 | 28 | 18.8 | 23.9 | 29.7 | 22.3 |
| 41. C. vulgaris_30308_{—} | 35.6 | 24.3 | 17.6 | 29.2 | 47 | 21.5 | 50.4 | 47.6 | 23 | 25.5 | 26.8 | 19.3 | 41.9 | 56.3 |
| 42. Chlorella_24009_{—} | 32 | 24.5 | 16.6 | 26.6 | 47.1 | 19.9 | 45.2 | 41.6 | 22.1 | 25 | 27.9 | 18.5 | 39.9 | 51.9 |
| 43. D. melanogaster_tos-PA_III | 23.9 | 24.2 | 30.4 | 26.5 | 16.1 | 23.6 | 17.8 | 17.6 | 25.9 | 23.4 | 19.6 | 23.4 | 20.8 | 16.9 |
| 44. G. max_Glyma05g29660.1_{—} | | 29.7 | 22.1 | 54.9 | 30.4 | 34.4 | 40 | 39.2 | 42 | 31.3 | 25.2 | 22.8 | 43 | 32.2 |
| 45. G. max_Glyma07g11320.1_{—} | | | 22.3 | 31.7 | 23.1 | 24 | 25 | 25.7 | 27.8 | 56.4 | 22.6 | 23.2 | 29.7 | 25.4 |
| 46. H. sapiens_NM_130398.2_{—} | | | | 25.9 | 17.6 | 26.4 | 16.2 | 15.2 | 25.6 | 23.6 | 19.1 | 23.8 | 18.4 | 18.1 |
| 47. M. | | | | | 25.7 | 38.1 | 34.1 | 33.3 | 47.7 | 30.1 | 21.4 | 26.3 | 35.6 | 27.6 |
| truncatula_AC153460_23.4_{—} | | | | | | | | | | | | | | |
| 48. O. lucimarinus_13915_{—} | | | | | | 19.7 | 47.3 | 42.7 | 20.9 | 23.4 | 26.7 | 18.2 | 39.3 | 43.5 |
| 49. O. | | | | | | | 23.7 | 23.7 | 43.9 | 23.1 | 17.5 | 24.3 | 25.5 | 20.1 |
| sativa_LOC_Os01g56940.1_III | | | | | | | | | | | | | | |
| 50. P. patens_114516_{—} | | | | | | | | 76.5 | 27.2 | 25.9 | 23.7 | 17.4 | 48.9 | 43.6 |
| 51. P. patens_194153_{—} | | | | | | | | | 26.9 | 24.9 | 24 | 17.2 | 48.6 | 43 |
| 52. P. trichocarpa_scaff_XI.493_III | | | | | | | | | | 26.8 | 18.9 | 25.6 | 30 | 21.8 |
| 53. P. trichocarpa_scaff_XV.367_{—} | | | | | | | | | | | 24.1 | 23.2 | 28.5 | 25.4 |
| 54. S. cerevisiae_YDR263C_{—} | | | | | | | | | | | | 33 | 26.3 | 25.3 |
| 55. S. cerevisiae_YOR033C_{—} | | | | | | | | | | | | | 20.6 | 17.8 |
| 56. S. moellendorffii_175620_{—} | | | | | | | | | | | | | | 40.1 |
| 57. V. carteri_61592_{—} | | | | | | | | | | | | | | |

### 6. YiAP2 Polypeptides

[0681] Results of the software analysis are shown in Table B6 for the global similarity and identity over the full length of the polypeptide sequences. The sequence identity (in %) between the YiAP2 polypeptide sequence of SEQ ID NO: 836 and other YiAP2 polypeptides of Table B6 are 66.9%, 77%, 58.4%, 57.9%, 67.1%, and 84%.

TABLE B6
MatGAT results for global similarity and identity over the full length of the polypeptide sequences.

| Polypeptide Nr. | Name | 1 | 2 | 3 | 4 | 5 | 6 | 7 | 8 | 9 | 10 |
|---|---|---|---|---|---|---|---|---|---|---|---|
| 1 | A. thaliana_AT1G16060.1#1 | | 57.7 | 51 | 49.9 | 50.7 | 60.7 | 52.1 | 51.5 | 51.2 | 58 |
| 2 | Aquilegia_sp_TC20979#1 | 74.1 | | 53.7 | 51.7 | 53.8 | 61.8 | 64.2 | 61.7 | 61.5 | 61.4 |
| 3 | C. clementina_DY288437#1 | 58.6 | 58.3 | | 77 | 77.5 | 61.7 | 54.1 | 53.8 | 53.5 | 55.8 |
| 4 | C. sinensis_EY655317#1 | 58 | 58.6 | 78.4 | | 63.3 | 59.3 | 53.7 | 51.5 | 51.3 | 54.7 |
| 5 | G. hirsutum_TC125414#1 | 58 | 60.9 | 86.6 | 72 | | 58.6 | 52.1 | 52.6 | 52.4 | 55.3 |
| 6 | G. max_Glyma07g02380.1#1 | 70.7 | 70.7 | 68.6 | 69.3 | 67.9 | | 60.4 | 58.4 | 58.1 | 63.1 |
| 7 | G. max_Glyma17g07860.1#1 | 66.9 | 79.1 | 58 | 60.3 | 58.3 | 68 | | 70.1 | 69.8 | 57.3 |
| 8 | M. truncatula_AC126784_15#1 | 66.9 | 77 | 58.4 | 57.9 | 57.9 | 67.1 | 84 | | 99.7 | 57.7 |
| 9 | Medtr_AP2 | 66.9 | 77 | 58.4 | 57.9 | 57.9 | 67.1 | 84 | 100 | | 57.4 |
| 10 | O. basilicum_TA1087_39350#1 | 71 | 74.1 | 62.5 | 63.1 | 62.2 | 73.8 | 71.1 | 69.7 | 69.7 | |
| 11 | O. sativa_LOC_Os08g34360.1#1 | 57.8 | 61.6 | 47.7 | 48 | 46.1 | 56.6 | 60.4 | 61.1 | 61.1 | 59.4 |
| 12 | O. sativa_LOC_Os09g25600.1#1 | 66.8 | 69.7 | 53.3 | 54.9 | 53 | 63.9 | 67 | 66.2 | 66.2 | 66.2 |
| 13 | P. trichocarpa_800184#1 | 65.8 | 71.3 | 72.7 | 72.7 | 73.1 | 81.5 | 69.1 | 65.4 | 65.4 | 72.6 |
| 14 | R. communis_EG658396#1 | 60.3 | 61.8 | 86.3 | 74.6 | 88 | 72.5 | 59.7 | 59.6 | 59.6 | 65.8 |
| 15 | S. bicolor_Sb02g025080.1#1 | 63.1 | 65.6 | 50.3 | 50.8 | 52 | 59 | 63.6 | 62.1 | 62.1 | 61.6 |
| 16 | S. tuberosum_TC187592#1 | 71 | 78.2 | 58 | 58.8 | 58.3 | 66.3 | 76.2 | 74.6 | 74.6 | 72.7 |
| 17 | Triphysaria_sp_TC12598#1 | 71 | 72.7 | 56.3 | 58.6 | 55.8 | 67.9 | 72.1 | 71.9 | 71.9 | 73.5 |
| 18 | V. vinifera_GSVIVT00017130001#1 | 73.1 | 85.1 | 59.7 | 59.7 | 60.6 | 68 | 81.1 | 78.1 | 78.1 | 75.1 |
| 19 | Z. mays_TC386652#1 | 63.1 | 66.9 | 50.3 | 51.8 | 52.3 | 59.3 | 63.6 | 64.4 | 64.4 | 62.9 |

| Polypeptide Nr. | Name | 11 | 12 | 13 | 14 | 15 | 16 | 17 | 18 | 19 |
|---|---|---|---|---|---|---|---|---|---|---|
| 1 | A. thaliana_AT1G16060.1#1 | 47.8 | 54.7 | 57.6 | 53.3 | 48.7 | 59.1 | 56.8 | 57 | 51.7 |
| 2 | Aquilegia_sp_TC20979#1 | 49.9 | 58.2 | 63.4 | 56.1 | 55.9 | 67.7 | 59.9 | 74.1 | 56.4 |
| 3 | C. clementina_DY288437#1 | 41.1 | 49.5 | 65.8 | 81.7 | 46.2 | 52.8 | 50.7 | 55.1 | 46.8 |
| 4 | C. sinensis_EY655317#1 | 40.8 | 48.4 | 64 | 67.7 | 45.7 | 51.1 | 50.4 | 54 | 46.3 |
| 5 | G. hirsutum_TC125414#1 | 40.6 | 47.8 | 64.8 | 80.2 | 47.2 | 54.3 | 48.5 | 56.9 | 47.1 |
| 6 | G. max_Glyma07g02380.1#1 | 49.2 | 55.9 | 73.4 | 63.6 | 51.8 | 59.9 | 58.8 | 61.5 | 52.5 |
| 7 | G. max_Glyma17g07860.1#1 | 48.5 | 56.3 | 59.2 | 54.1 | 51.5 | 60.4 | 56.8 | 68.3 | 53.5 |
| 8 | M. truncatula_AC126784_15#1 | 48 | 56.2 | 56.3 | 54 | 52.6 | 57.9 | 55.1 | 65.4 | 53.6 |
| 9 | Medtr_AP2 | 47.8 | 55.9 | 56 | 53.8 | 52.3 | 57.6 | 54.9 | 65.1 | 53.3 |
| 10 | O. basilicum_TA1087_39350#1 | 47.1 | 55.3 | 62.5 | 57.8 | 51.3 | 62.6 | 61 | 63.1 | 52.3 |
| 11 | O. sativa_LOC_Os08g34360.1#1 | | 57.5 | 46.5 | 41.8 | 56.2 | 51.8 | 50 | 49.9 | 57.2 |
| 12 | O. sativa_LOC_Os09g25600.1#1 | 69.5 | | 56.2 | 51.6 | 74.4 | 59.6 | 57.4 | 60 | 76.7 |
| 13 | P. trichocarpa_800184#1 | 55.4 | 62.5 | | 68.2 | 51.9 | 63.5 | 56.8 | 64.2 | 52.5 |
| 14 | R. communis_EG658396#1 | 50.1 | 55.4 | 75.3 | | 47.4 | 55.2 | 52.5 | 58.2 | 48 |
| 15 | S. bicolor_Sb02g025080.1#1 | 70.6 | 80.9 | 57.8 | 52.3 | | 55.7 | 53.6 | 55.8 | 81.1 |
| 16 | S. tuberosum_TC187592#1 | 62.5 | 70.2 | 69.1 | 60.5 | 67.1 | | 60.6 | 66.3 | 56.3 |
| 17 | Triphysaria_sp_TC12598#1 | 60.6 | 68.6 | 63.9 | 59.2 | 64.3 | 75.4 | | 63.6 | 55.6 |
| 18 | V. vinifera_GSVIVT00017130001#1 | 61.3 | 70.7 | 71.1 | 62.6 | 65.1 | 78.7 | 76.1 | | 58.4 |
| 19 | Z. mays_TC386652#1 | 72.6 | 82.3 | 59.6 | 51.8 | 87.4 | 69.2 | 66.4 | 68.2 | |

### Example 4

### Identification of Domains Comprised in Polypeptide Sequences Useful in Performing the Methods of the Invention

[0682] The Integrated Resource of Protein Families, Domains and Sites (InterPro) database is an integrated interface for the commonly used signature databases for text- and sequence-based searches. The InterPro database combines these databases, which use different methodologies and varying degrees of biological information about well-characterized proteins to derive protein signatures. Collaborating databases include SWISS-PROT, PROSITE, TrEMBL, PRINTS, ProDom and Pfam, Smart and TIGRFAMs. Pfam is a large collection of multiple sequence alignments and hidden Markov models covering many common protein domains and families. Pfam is hosted at the Sanger Institute server in the United Kingdom. Interpro is hosted at the European Bioinformatics Institute in the United Kingdom.

1. FSM1-like (Fruit Sant/Myb) Polypeptides

[0683] The results of the InterPro scan of the polypeptide sequence as represented by SEQ ID NO: 2 are presented in Table C1.

TABLE C1
InterPro scan results (major accession numbers) of the polypeptide
sequence as represented by SEQ ID NO: 2.

| Method | AccNumber | ShortName | Score | Location |
|---|---|---|---|---|
| INTERPRO | IPR001005 | SANT, DNA-binding | | |
| SMART | SM00717 | SANT | 7.5E−9 | [10-62]T |
| PROFILE | PS50090 | MYB_3 | 0.0 | [6-60]T |
| INTERPRO | IPR009057 | Homeodomain-like | | |
| SUPERFAMILY | SSF46689 | Homeodomain_like | 7.0E−13 | [13-67]T |
| INTERPRO | IPR014778 | Myb, DNA-binding | | |
| PFAM | PF00249 | Myb_DNA-binding | 4.8E−4 | [11-60]T |
| INTERPRO | IPR015609 | Molecular chaperone, heat shock | | |
| | | protein, Hsp40, DnaJ | | |
| PANTHER | PTHR11821 | Hsp40/DnaJ_Rel | 9.0E−8 | [13-59]T |
| INTERPRO | noIPR | unintegrated | | |
| PANTHER | PTHR11821:SF29 | PTHR11821:SF29 | 9.0E−8 | [13-59]T |

2. PIF3-like (Phytochrome Interacting Factor 3) Polypeptides

[0684] The results of the InterPro scan of the polypeptide sequence as represented by SEQ ID NO: 293 are presented in Table C2.

TABLE C2
InterPro scan results (major accession numbers) of the polypeptide
sequence as represented by SEQ ID NO: 293.

| | | | Amino acid |
|---|---|---|---|
| | | | coordinates |
| Database | Accession number | Accession name | on SEQ ID NO 2 |
| InterPro | IPR001092 | Basic helix-loop-helix | |
| | | dimerisation region bHLH | |
| HMMPfam | PF00010 | HLH | T[270-319] 7.6e−17 |
| HMMSmart | SM00353 | no description | T[275-324] 4.1e−19 |
| ProfileScan | PS50888 | HLH | T[266-319] 16.780 |
| InterPro | IPR011598 | Helix-loop-helix DNA-binding | |
| Gene3D | G3DSA:4.10.280.10 | no description | T[266-324] 2.5e−08 |
| Superfamily | SSF47459 | HLH, helix-loop-helix DNA- | T[267-351] 3.2e−19 |
| | | binding domain | |
| InterPro | NULL | NULL | |
| HMMPanther | PTHR12565 | STEROL REGULATORY | T[278-318] 2.2e−09 |
| | | ELEMENT-BINDING PROTEIN | |
| HMMPanther | PTHR12565:SF7 | CENTROMERE-BINDING | T[278-318] 2.2e−09 |
| | | PROTEIN 1, CBP-1 | |
| InterPro | IPR001092 | Basic helix-loop-helix | |
| | | dimerisation region bHLH | |

### 3. UROD (Uroporphyrinogen III Decarboxylase) Polypeptide

[0685] The results of the InterPro scan of the polypeptide sequence as represented by SEQ ID NO: 368 are presented in Table C3.

TABLE C3
InterPro scan results (major accession numbers) of the polypeptide
sequence as representedby SEQ ID NO: 368.

| | | Domain ID | Short | |
|---|---|---|---|---|
| Method | | and name | Name | Location |
| Interpro | IPR000257 | Uroporphyrinogen | URO-D | 4.8e−146 |
| | | decarboxylase | | [50-390]T |
| PFAM | PF01208 | Uroporphyrinogen | UROD_1 | NA |
| | | decarboxylase | | [68-77]? |
| PROSITE | PS00907 | Uroporphyrinogen | UROD_2 | 8e−5[187- |
| | | decarboxylase | | 203]T |
| Interpro | IPR006361 | Uroporphyrinogen | | |
| | | decarboxylase | | |
| | | HemE | | |
| PANTHER | PTHR21091: | Uroporphyrinogen | | 1e−127 |
| | SF2 | decarboxylase | | [65-390]T |
| TIGRFAMs | TIGR01464 | hemE: | | 3.6e−187 |
| | | uroporphyrinogen | | [54-389]T |
| | | decarboxylase | | |

### 4. AS-MTT (Abiotic Stress Membrane Tethered Transcription Factor) Polypeptides

[0686] The results of the InterPro scan of the polypeptide sequence as represented by SEQ ID NO: 537 are presented in Table C4.

TABLE C4
InterPro scan results (major accession numbers) of the polypeptide
sequence as represented by SEQ ID NO: 537.

| | | | | Location |
|---|---|---|---|---|
| | Domain | | Short | (Amino acid |
| Interpro ID | ID | Domain name | Name | coordinates) |
| IPRO12458 | PF07889 | Protein of unknown | DUF | 94-216 |
| | | function DUF1664 | 1664 | |
| Un- | SIGNALP | Signal-peptide | SignalP | 1-23 |
| integrated | | | | |
| | TMHMM | TRANSMEMBRANE- | | 5-25 and |
| | | REGIONS | | 95-115 |

### 5. EXO-1 Polypeptide

[0687] The results of the InterPro scan of the polypeptide sequence as represented by SEQ ID NO: 763 are presented in Table C5.

TABLE C5
InterPro scan results (major accession numbers) of the polypeptide
sequence as represented by SEQ ID NO: 763.

| | | | Amino acid |
|---|---|---|---|
| | | | coordinates |
| | Accession | | on SEQ ID |
| Database | number | Accession name | NO: 763 |
| HMMPfam | PF00752 | XPG_N | 1-99 |
| HMMPfam | PF00867 | XPG_I | 138-230 |
| HMMPanther | PTHR11081: | EXONUCLEASE | 17-333 |
| | SF8 | 1 | |
| HMMPanther | PTHR11081 | XP-G/RAD2 DNA | 17-333 |
| | | REPAIR | |
| | | ENDONUCLEASE | |
| | | FAMILY | |
| superfamily | SSF88723 | PIN domain-like | 2-226 |
| ScanRegExp | PS00841 | XPG_1 | 71-85 |
| FPrintScan | PR00853 | XPGRADSUPER | 24-38 |
| FPrintScan | PR00853 | XPGRADSUPER | 73-92 |
| FPrintScan | PR00853 | XPGRADSUPER | 137-154 |
| FPrintScan | PR00853 | XPGRADSUPER | 158 178 |
| FPrintScan | PR00853 | XPGRADSUPER | 216 231 |
| HMMSmart | SM00485 | XPGN | 1 99 |
| HMMSmart | SM00484 | XPGI | 138 208 |
| HMMSmart | SM00279 | HhH2 | 213 246 |
| Gene3D | G3DSA: | no description | 16 195 |
| | 3.40.50.1010 | | |

### 6. YiAP2 Polypeptides

[0688] The results of the InterPro scan of the polypeptide sequence as represented by SEQ ID NO: 836 are presented in Table C6.

TABLE C6
InterPro scan results (major accession numbers) of the polypeptide
sequence as represented by SEQ ID NO: 836.

| | | | | Amino |
|---|---|---|---|---|
| | | | | Acid |
| | | Accession | | Coordi- |
| InterPro | Database | nr | Name | nates |
| IPR001471 | PRINTS | PR00367 | ETHRSPELEMNT | [51-62] |
| | | | | and |
| | | | | [189-209] |
| Domain | GENE3D | G3DSA: | no description | [49-116] |
| | | 3.30.730.10 | | and |
| | | | | [148-210] |
| Pathogenesis- | PFAM | PF00847 | AP2 | [49-106] |
| related | | | | and |
| transcriptional | | | | [148-200] |
| factor/ERF, | | | | |
| DNA-binding | | | | |
| | SMART | SM00380 | AP2 | [50-119] |
| | | | | and |
| | | | | [149-213] |
| | PROFILE | PS51032 | AP2_ERF | [50-113] |
| | | | | and |
| | | | | [149-207] |

### Example 5

### Topology Prediction of the Polypeptide Sequences Useful in Performing the Methods of the Invention

[0689] TargetP 1.1 predicts the subcellular location of eukaryotic proteins. The location assignment is based on the predicted presence of any of the N-terminal pre-sequences: chloroplast transit peptide (cTP), mitochondrial targeting peptide (mTP) or secretory pathway signal peptide (SP). Scores on which the final prediction is based are not really probabilities, and they do not necessarily add to one. However, the location with the highest score is the most likely according to TargetP, and the relationship between the scores (the reliability class) may be an indication of how certain the prediction is. The reliability class (RC) ranges from 1 to 5, where 1 indicates the strongest prediction. TargetP is maintained at the server of the Technical University of Denmark.

[0690] For the sequences predicted to contain an N-terminal presequence a potential cleavage site can also be predicted.

[0691] A number of parameters were selected, such as organism group (non-plant or plant), cutoff sets (none, predefined set of cutoffs, or user-specified set of cutoffs), and the calculation of prediction of cleavage sites (yes or no).

1. FSM1-like (Fruit Sant/Myb) Polypeptides

[0692] The results of TargetP 1.1 analysis of the polypeptide sequence as represented by SEQ ID NO: 2 are presented Table D1. The “plant” organism group has been selected, no cutoffs defined, and the predicted length of the transit peptide requested. The subcellular localization of the polypeptide sequence as represented by SEQ ID NO: 2 may be the cytoplasm or nucleus, no transit peptide is predicted.

TABLE D1
TargetP 1.1 analysis of the polypeptide sequence as
represented by SEQ ID NO: 2.

| Name | Len | cTP | mTP | SP | other | Loc | RC | TPlen |
|---|---|---|---|---|---|---|---|---|
| SEQ ID NO: 2 | 88 | 0.505 | 0.093 | 0.089 | 0.548 | — | 5 | — |
| cutoff | | 0.000 | 0.000 | 0.000 | 0.000 | | | |

Abbreviations:
Len, Length;
cTP, Chloroplastic transit peptide;
mTP, Mitochondrial transit peptide,
SP, Secretory pathway signal peptide,
other, Other subcellular targeting,
Loc, Predicted Location;
RC, Reliability class;
TPlen, Predicted transit peptide length.

[0693] When using the protein localisation prediction algorithm (PLOC, Park and Kanehisa, Bioinformatics, 19, 1656-1663, 2003), SEQ ID NO: 2 is predicted to have a nuclear localisation, which is in line with its postulated function as transcription factor.

[0694] Many other algorithms can be used to perform such analyses, including:
[0695] ChloroP 1.1 hosted on the server of the Technical University of Denmark;
[0696] Protein Prowler Subcellular Localisation Predictor version 1.2 hosted on the server of the Institute for Molecular Bioscience, University of Queensland, Brisbane, Australia;
[0697] PENCE Proteome Analyst PA-GOSUB 2.5 hosted on the server of the University of Alberta, Edmonton, Alberta, Canada;
[0698] TMHMM, hosted on the server of the Technical University of Denmark
[0699] PSORT (URL: psort.org)
   2. PIF3-like (Phytochrome Interacting Factor 3) Polypeptides

[0700] The results of TargetP 1.1 analysis of the polypeptide sequence as represented by SEQ ID NO: 293 are presented Table D2. The “plant” organism group has been selected, no cutoffs defined, and the predicted length of the transit peptide requested. The subcellular localization of the polypeptide sequence as represented by SEQ ID NO: 293 may be the cytoplasm or nucleus, no transit peptide is predicted.

TABLE D2
TargetP 1.1 analysis of the polypeptide sequence as
represented by SEQ ID NO: 293.

| Name | Len | cTP | mTP | SP | other | Loc | RC | TPlen |
|---|---|---|---|---|---|---|---|---|
| OsPIF3 | 445 | 0.173 | 0.067 | 0.046 | 0.897 | — | 2 | — |
| cutoff | | 0.000 | 0.000 | 0.000 | 0.000 | | | |

Abbreviations:
Len, Length;
cTP, Chloroplastic transit peptide;
mTP, Mitochondrial transit peptide,
SP, Secretory pathway signal peptide,
other, Other subcellular targeting,
Loc, Predicted Location;
RC, Reliability class;
TPlen, Predicted transit peptide length.

[0701] When analysed with PLOC (Park and Kanehisa, Bioinformatics, 19, 1656-1663, 2003), a nuclear localisation is predicted, which is in line with the experimental data (Fairchild et al., 2000).

[0702] Many other algorithms can be used to perform such analyses, including:
[0703] ChloroP 1.1 hosted on the server of the Technical University of Denmark;
[0704] Protein Prowler Subcellular Localisation Predictor version 1.2 hosted on the server of the Institute for Molecular Bioscience, University of Queensland, Brisbane, Australia;
[0705] PENCE Proteome Analyst PA-GOSUB 2.5 hosted on the server of the University of Alberta, Edmonton, Alberta, Canada;
[0706] TMHMM, hosted on the server of the Technical University of Denmark
[0707] PSORT (URL: psort.org)

### 3. UROD (Uroporphyrinogen III Decarboxylase) Polypeptide

[0708] Many other algorithms can be used to perform such analyses, including:
[0709] ChloroP 1.1 hosted on the server of the Technical University of Denmark;
[0710] Protein Prowler Subcellular Localisation Predictor version 1.2 hosted on the server of the Institute for Molecular Bioscience, University of Queensland, Brisbane, Australia;
[0711] PENCE Proteome Analyst PA-GOSUB 2.5 hosted on the server of the University of Alberta, Edmonton, Alberta, Canada;
[0712] TMHMM, hosted on the server of the Technical University of Denmark
[0713] PSORT (URL: psort.org)
[0714] PLOC (Park and Kanehisa, Bioinformatics, 19, 1656-1663, 2003).

### 4. AS-MTT (Abiotic Stress Membrane Tethered Transcription Factor) Polypeptides

[0715] Many other algorithms can be used to perform such analyses, including:
[0716] ChloroP 1.1 hosted on the server of the Technical University of Denmark;
[0717] Protein Prowler Subcellular Localisation Predictor version 1.2 hosted on the server of the Institute for Molecular Bioscience, University of Queensland, Brisbane, Australia;
[0718] PENCE Proteome Analyst PA-GOSUB 2.5 hosted on the server of the University of Alberta, Edmonton, Alberta, Canada;
[0719] TMHMM, hosted on the server of the Technical University of Denmark
[0720] PSORT (URL: psort.org)
[0721] PLOC (Park and Kanehisa, Bioinformatics, 19, 1656-1663, 2003).

### 5. EXO-1 Polypeptide

[0722] Many other algorithms can be used to perform such analyses, including:
[0723] ChloroP 1.1 hosted on the server of the Technical University of Denmark;
[0724] Protein Prowler Subcellular Localisation Predictor version 1.2 hosted on the server of the Institute for Molecular Bioscience, University of Queensland, Brisbane, Australia;
[0725] PENCE Proteome Analyst PA-GOSUB 2.5 hosted on the server of the University of Alberta, Edmonton, Alberta, Canada;
[0726] TMHMM, hosted on the server of the Technical University of Denmark
[0727] PSORT (URL: psort.org)
[0728] PLOC (Park and Kanehisa, Bioinformatics, 19, 1656-1663, 2003).

### 6. YiAP2 Polypeptides

[0729] Many other algorithms can be used to perform such analyses, including:
[0730] ChloroP 1.1 hosted on the server of the Technical University of Denmark;
[0731] Protein Prowler Subcellular Localisation Predictor version 1.2 hosted on the server of the Institute for Molecular Bioscience, University of Queensland, Brisbane, Australia;
[0732] PENCE Proteome Analyst PA-GOSUB 2.5 hosted on the server of the University of Alberta, Edmonton, Alberta, Canada;
[0733] TMHMM, hosted on the server of the Technical University of Denmark
[0734] PSORT (URL: psort.org)
[0735] PLOC (Park and Kanehisa, Bioinformatics, 19, 1656-1663, 2003).

### Example 6

### Assay Related to the Polypeptide Sequences Useful in Performing the Methods of the Invention

[0736] 1. FSM1-like (Fruit Sant/Myb) Polypeptides

[0737] DNA binding assays are well known in the art, including PCR-assisted DNA binding site selection and a DNA binding gel-shift assay; for a general reference, see Current Protocols in Molecular Biology, Volumes 1 and 2, Ausubel et al. (1994), Current Protocols.

[0738] A DNA binding assay for MYB7, as an example for MYB proteins in general, is described in Li and Parish (Plant J. 8, 963-972, 1995). Briefly, the MYB7 coding sequence is cloned in frame with the T7 gene 10 leader sequence and expressed in E. coli. The proteins are purified and analysed in a mobility retardation assay, using 32P-labeled c-myb binding site (MBS) and the binding site of the maize P gene product (PBS). In this way, it was shown that MYB7 from Arabidopsis thaliana did bind to the MBS site though not with high affinity, and had a binding preference for the PBS site.

2. PIF3-like (Phytochrome Interacting Factor 3) Polypeptides

[0739] In Arabidopsis, PIF3 forms a complex with HFR1. Fairchild et al. (2000) describe a yeast two-hybrid binding assay as well as immunoprecipitations for demonstrating this interaction in vitro. The yeast two-hybrid assay was carried out according to standard procedures, for the immunoprecipitations, either mixtures of PIF3, GAD (galactose activation domain) and the HFR1-GAD fusion, or mixtures of HFR, GAD and the PIF3-GAD fusion were used (Fairchild et al., 2000).

[0740] Following a pulse of red light, phyA, phyB, phyC, and phyD interact in vivo with the PHYTOCHROME INTERACTING FACTOR3 basic helix-loop-helix transcription factor. These interactions were demonstrated using a yeast two-hybrid binding assay as well as immunoprecipitations (Clack et al., Plant Cell. 2009 March; 21(3):786-99) Al-Sady et al. (Molecular Cell. 2006 Aug. 4; 23(3):439-46) provide evidence that photoactivation of phy induces rapid in vivo phosphorylation of PIF3 preceding degradation. Both phyA and phyB redundantly induce this PIF3 phosphorylation, as well as nuclear speckle formation and degradation, by direct interaction with PIF3 via separate binding sites.

### 3. UROD (Uroporphyrinogen III Decarboxylase) Polypeptide

[0741] Porphyrin activity is measured using chromatographic and spectral methods, such as HPLC and TLC as described in Jacobs and Jacobs, 1993 (Plant Physiol. 101(4): 1181-1187) and Magnetic Circular Dichroism as described in Ivanetich et al., 1984 (Clin Chem. 30(3): 391-4).

### 4. EXO-1 Polypeptide

[0742] Functional assays were performed according to Furukawa et al., 2008—Plant Mol Biol (2008) 66:519-531. Enzymatic assays were performed according to Furukawa et al., 2003-Plant Molecular Biology 51: 59-70, 2003.

### Example 7

### Cloning of the Nucleic Acid Sequence Used in the Methods of the Invention

[0743] 1. FSM1-like (Fruit Sant/Myb) Polypeptides

[0744] The nucleic acid sequence was amplified by PCR using as template a custom-made Solanum lycopersicum seedlings cDNA library (in pCMV Sport 6.0; Invitrogen, Paisley, UK). PCR was performed using Hifi Taq DNA polymerase in standard conditions, using 200 ng of template in a 50 μl PCR mix. The primers used were prm10562 (SEQ ID NO: 290; sense, start codon in bold): 5′-ggggacaagtttgtacaaaaaagcaggcttaaacaatgagctcgatgtcgtctca-3′ and prm10563 (SEQ ID NO: 291; reverse, complementary): 5′-ggggaccactttgtacaagaaagctggg taagtgttaggttttgctccttt-3′, which include the AttB sites for Gateway recombination. The amplified PCR fragment was purified also using standard methods. The first step of the Gateway procedure, the BP reaction, was then performed, during which the PCR fragment recombined in vivo with the pDONR201 plasmid to produce, according to the Gateway terminology, an “entry clone”, pFSM1-like. Plasmid pDONR201 was purchased from Invitrogen, as part of the Gateway® technology.

[0745] The entry clone comprising SEQ ID NO: 1 was then used in an LR reaction with a destination vector used for Oryza sativa transformation. This vector contained as functional elements within the T-DNA borders: a plant selectable marker; a screenable marker expression cassette; and a Gateway cassette intended for LR in vivo recombination with the nucleic acid sequence of interest already cloned in the entry clone. A rice GOS2 promoter (SEQ ID NO: 289) for constitutive specific expression was located upstream of this Gateway cassette.

[0746] After the LR recombination step, the resulting expression vector pGOS2::FSM1-like (FIG. 4) was transformed into Agrobacterium strain LBA4044 according to methods well known in the art.

2. PIF3-like (Phytochrome Interacting Factor 3) Polypeptides

[0747] The nucleic acid sequence was amplified by PCR using as template a custom-made Oryza sativa seedlings cDNA library (in pCMV Sport 6.0; Invitrogen, Paisley, UK). PCR was performed using Hifi Taq DNA polymerase in standard conditions, using 200 ng of template in a 50 μl PCR mix. The primers used were prm12326 (SEQ ID NO: 364; sense, start codon in bold): 5′-ggggacaagtttgtacaaaaaagcaggcttaaacaatgaaccagttcgtccctg-3′ and prm12327 (SEQ ID NO: 365; reverse, complementary): 5′-ggggaccactttgtacaagaaagctgggtcagaa tgtcgtcaggagtcag-3′, which include the AttB sites for Gateway recombination. The amplified PCR fragment was purified also using standard methods. The first step of the Gateway procedure, the BP reaction, was then performed, during which the PCR fragment recombined in vivo with the pDONR201 plasmid to produce, according to the Gateway terminology, an “entry clone”, pPIF3-like. Plasmid pDONR201 was purchased from Invitrogen, as part of the Gateway® technology.

[0748] The entry clone comprising SEQ ID NO: 292 was then used in an LR reaction with a destination vector used for Oryza sativa transformation. This vector contained as functional elements within the T-DNA borders: a plant selectable marker; a screenable marker expression cassette; and a Gateway cassette intended for LR in vivo recombination with the nucleic acid sequence of interest already cloned in the entry clone. A rice GOS2 promoter (SEQ ID NO: 366) for constitutive specific expression was located upstream of this Gateway cassette.

[0749] After the LR recombination step, the resulting expression vector pGOS2::PIF3-like (FIG. 9) was transformed into Agrobacterium strain LBA4044 according to methods well known in the art.

### 3. UROD (Uroporphyrinogen III Decarboxylase) Polypeptide

[0750] The nucleic acid sequence was amplified by PCR using a Populus trichocarpa cDNA library (in pCMV Sport 6.0; Invitrogen, Paisley, UK). PCR was performed using Hifi Taq DNA polymerase in standard conditions, using 200 ng of template in a 50 μl PCR mix. The primers used were prm12179 (SEQ ID NO: 534; sense, start codon in bold): 5′-ggggacaag tttgtacaaaaaagcaggcttaaacaatgaactctgcttctcttagc-3′ and prm12180 (SEQ ID NO: 535; reverse, complementary): 5′-ggggaccactttgtacaagaaagctgggtgacaccactccttaaactacc-3′, which include the AttB sites for Gateway recombination. The amplified PCR fragment was purified also using standard methods. The first step of the Gateway procedure, the BP reaction, was then performed, during which the PCR fragment recombined in vivo with the pDONR201 plasmid to produce, according to the Gateway terminology, an “entry clone”, pUROD. Plasmid pDONR201 was purchased from Invitrogen, as part of the Gateway® technology.

[0751] The entry clone comprising SEQ ID NO: 367 was then used in an LR reaction with a destination vector used for Oryza sativa transformation. This vector contained as functional elements within the T-DNA borders: a plant selectable marker; a screenable marker expression cassette; and a Gateway cassette intended for LR in vivo recombination with the nucleic acid sequence of interest already cloned in the entry clone. A rice GOS2 promoter (SEQ ID NO: 533) for constitutive specific expression was located upstream of this Gateway cassette.

[0752] After the LR recombination step, the resulting expression vector pGOS2::UROD (FIG. 14) was transformed into Agrobacterium strain LBA4044 according to methods well known in the art.

### 4. AS-MTT (Abiotic Stress Membrane Tethered Transcription Factor) Polypeptides

[0753] The nucleic acid sequence used in the methods of the invention was amplified by PCR using as template a custom-made Populus trichocarpa v1.1 seedlings cDNA library (in pCMV Sport 6.0; Invitrogen, Paisley, UK). PCR was performed using Hifi Taq DNA polymerase in standard conditions, using 200 ng of template in a 50 μl PCR mix. The primers used were as represented by SEQ ID NO: 657 (sense) and SEQ ID NO: 658 (reverse, complementary) which include the AttB sites for Gateway recombination. The amplified PCR fragment was purified also using standard methods. The first step of the Gateway procedure, the BP reaction, was then performed, during which the PCR fragment recombined in vivo with the pDONR201 plasmid to produce, according to the Gateway terminology, an “entry clone”, pAS_MTT. Plasmid pDONR201 was purchased from Invitrogen, as part of the Gateway® technology.

[0754] The entry clone comprising SEQ ID NO: 536 was then used in an LR reaction with a destination vector used for Oryza sativa transformation. This vector contained as functional elements within the T-DNA borders: a plant selectable marker; a screenable marker expression cassette; and a Gateway cassette intended for LR in vivo recombination with the nucleic acid sequence of interest already cloned in the entry clone. A rice GOS2 promoter (SEQ ID NO: 659) for constitutive specific expression was located upstream of this Gateway cassette.

[0755] After the LR recombination step, the resulting expression vector pGOS2::AS-MTT (FIG. 17) was transformed into Agrobacterium strain LBA4044 according to methods well known in the art.

### 5. EXO-1 Polypeptide

[0756] The nucleic acid sequence was amplified by PCR using as template a custom-made Populus trichocarpa seedlings cDNA library (in pCMV Sport 6.0; Invitrogen, Paisley, UK). PCR was performed using Hifi Taq DNA polymerase in standard conditions, using 200 ng of template in a 50 μl PCR mix.

[0757] The primers used were prm12748 (SEQ ID NO: 833; sense, start codon in bold): 5′-gggga caagtttgtacaaaaaagcaggcttaaacaatgggaatacaagggctttta-3′ and prm12749 (SEQ ID NO: 834; reverse, complementary): 5′-ggggaccactttgtacaagaaagctgggtgttttccaaaagtcagcgtct-3′, which include the AttB sites for Gateway recombination. The amplified PCR fragment was purified also using standard methods. The first step of the Gateway procedure, the BP reaction, was then performed, during which the PCR fragment recombined in vivo with the pDONR201 plasmid to produce, according to the Gateway terminology, an “entry clone”, pEXO-1. Plasmid pDONR201 was purchased from Invitrogen, as part of the Gateway® technology.

[0758] The entry clone comprising SEQ ID NO: 762 was then used in an LR reaction with a destination vector used for Oryza sativa transformation. This vector contained as functional elements within the T-DNA borders: a plant selectable marker; a screenable marker expression cassette; and a Gateway cassette intended for LR in vivo recombination with the nucleic acid sequence of interest already cloned in the entry clone.

[0759] A rice GOS2 promoter (SEQ ID NO: 831) for constitutive specific expression was located upstream of this Gateway cassette. After the LR recombination step, the resulting expression vector pGOS2::EXO-1 (FIG. 20) was transformed into Agrobacterium strain LBA4044 according to methods well known in the art.

[0760] A rice beta expansin EXPB9 promoter (SEQ ID NO: 832) for shoot specific expression was located upstream of this Gateway cassette. After the LR recombination step, the resulting expression vector p EXPB9::EXO-1 (FIG. 21) was transformed into Agrobacterium strain LBA4044 according to methods well known in the art.

### 6. YiAP2 Polypeptides

[0761] The nucleic acid sequence was amplified by PCR using as template a custom-made Medicago truncatula seedlings cDNA library (in pCMV Sport 6.0; Invitrogen, Paisley, UK). PCR was performed using Hifi Taq DNA polymerase in standard conditions, using 200 ng of template in a 50 μl PCR mix. The primers used were: 5′-ggggacaagtttgtacaaaaa agcaggcttaaacaatggcgaaaaaatcgca-3′ (SEQ ID NO: 887; sense, start) and 5′-ggggaccactt tgtacaagaaagctgggtccatattctcttttgaattgagc-3′ (SEQ ID NO: 888; reverse, complementary) which include the AttB sites for Gateway recombination. The amplified PCR fragment was purified also using standard methods. The first step of the Gateway procedure, the BP reaction, was then performed, during which the PCR fragment recombined in vivo with the pDONR201 plasmid to produce, according to the Gateway terminology, an “entry clone”, pYiAP2. Plasmid pDONR201 was purchased from Invitrogen, as part of the Gateway® technology.

[0762] The entry clone comprising SEQ ID NO: 835 was then used in an LR reaction with a destination vector used for Oryza sativa transformation. This vector contained as functional elements within the T-DNA borders: a plant selectable marker; a screenable marker expression cassette; and a Gateway cassette intended for LR in vivo recombination with the nucleic acid sequence of interest already cloned in the entry clone. A rice GOS2 promoter (SEQ ID NO: 890) for constitutive specific expression was located upstream of this Gateway cassette.

[0763] After the LR recombination step, the resulting expression vector pGOS2::YiAP2 (FIG. 23) was transformed into Agrobacterium strain LBA4044 according to methods well known in the art.

### Example 8

### Plant Transformation

### Rice Transformation

[0764] The Agrobacterium containing the expression vector was used to transform Oryza sativa plants. Mature dry seeds of the rice japonica cultivar Nipponbare were dehusked. Sterilization was carried out by incubating for one minute in 70% ethanol, followed by 30 minutes in 0.2% HgCl₂, followed by a 6 times 15 minutes wash with sterile distilled water. The sterile seeds were then germinated on a medium containing 2,4-D (callus induction medium). After incubation in the dark for four weeks, embryogenic, scutellum-derived calli were excised and propagated on the same medium. After two weeks, the calli were multiplied or propagated by subculture on the same medium for another 2 weeks. Embryogenic callus pieces were sub-cultured on fresh medium 3 days before co-cultivation (to boost cell division activity).

[0765] Agrobacterium strain LBA4404 containing the expression vector was used for co-cultivation. Agrobacterium was inoculated on AB medium with the appropriate antibiotics and cultured for 3 days at 28° C. The bacteria were then collected and suspended in liquid co-cultivation medium to a density (OD₆₀₀) of about 1. The suspension was then transferred to a Petri dish and the calli immersed in the suspension for 15 minutes. The callus tissues were then blotted dry on a filter paper and transferred to solidified, co-cultivation medium and incubated for 3 days in the dark at 25° C. Co-cultivated calli were grown on 2,4-D-containing medium for 4 weeks in the dark at 28° C. in the presence of a selection agent. During this period, rapidly growing resistant callus islands developed. After transfer of this material to a regeneration medium and incubation in the light, the embryogenic potential was released and shoots developed in the next four to five weeks. Shoots were excised from the calli and incubated for 2 to 3 weeks on an auxin-containing medium from which they were transferred to soil. Hardened shoots were grown under high humidity and short days in a greenhouse.

[0766] Approximately 35 independent T0 rice transformants were generated for one construct. The primary transformants were transferred from a tissue culture chamber to a greenhouse. After a quantitative PCR analysis to verify copy number of the T-DNA insert, only single copy transgenic plants that exhibit tolerance to the selection agent were kept for harvest of T1 seed. Seeds were then harvested three to five months after transplanting. The method yielded single locus transformants at a rate of over 50% (Aldemita and Hodges1996, Chan et al. 1993, Hiei et al. 1994).

### Example 9

### Transformation of Other Crops

### Corn Transformation

[0767] Transformation of maize (Zea mays) is performed with a modification of the method described by Ishida et al. (1996) Nature Biotech 14(6): 745-50. Transformation is genotype-dependent in corn and only specific genotypes are amenable to transformation and regeneration. The inbred line A188 (University of Minnesota) or hybrids with A188 as a parent are good sources of donor material for transformation, but other genotypes can be used successfully as well. Ears are harvested from corn plant approximately 11 days after pollination (DAP) when the length of the immature embryo is about 1 to 1.2 mm. Immature embryos are cocultivated with Agrobacterium tumefaciens containing the expression vector, and transgenic plants are recovered through organogenesis. Excised embryos are grown on callus induction medium, then maize regeneration medium, containing the selection agent (for example imidazolinone but various selection markers can be used). The Petri plates are incubated in the light at 25° C. for 2-3 weeks, or until shoots develop. The green shoots are transferred from each embryo to maize rooting medium and incubated at 25° C. for 2-3 weeks, until roots develop. The rooted shoots are transplanted to soil in the greenhouse. T1 seeds are produced from plants that exhibit tolerance to the selection agent and that contain a single copy of the T-DNA insert.

### Wheat Transformation

[0768] Transformation of wheat is performed with the method described by Ishida et al. (1996) Nature Biotech 14(6): 745-50. The cultivar Bobwhite (available from CIMMYT, Mexico) is commonly used in transformation. Immature embryos are co-cultivated with Agrobacterium tumefaciens containing the expression vector, and transgenic plants are recovered through organogenesis. After incubation with Agrobacterium, the embryos are grown in vitro on callus induction medium, then regeneration medium, containing the selection agent (for example imidazolinone but various selection markers can be used). The Petri plates are incubated in the light at 25° C. for 2-3 weeks, or until shoots develop. The green shoots are transferred from each embryo to rooting medium and incubated at 25° C. for 2-3 weeks, until roots develop. The rooted shoots are transplanted to soil in the greenhouse. T1 seeds are produced from plants that exhibit tolerance to the selection agent and that contain a single copy of the T-DNA insert.

### Soybean Transformation

[0769] Soybean is transformed according to a modification of the method described in the Texas A&M patent U.S. Pat. No. 5,164,310. Several commercial soybean varieties are amenable to transformation by this method. The cultivar Jack (available from the Illinois Seed foundation) is commonly used for transformation. Soybean seeds are sterilised for in vitro sowing. The hypocotyl, the radicle and one cotyledon are excised from seven-day old young seedlings. The epicotyl and the remaining cotyledon are further grown to develop axillary nodes. These axillary nodes are excised and incubated with Agrobacterium tumefaciens containing the expression vector. After the cocultivation treatment, the explants are washed and transferred to selection media. Regenerated shoots are excised and placed on a shoot elongation medium. Shoots no longer than 1 cm are placed on rooting medium until roots develop. The rooted shoots are transplanted to soil in the greenhouse. T1 seeds are produced from plants that exhibit tolerance to the selection agent and that contain a single copy of the T-DNA insert.

### Rapeseed/Canola Transformation

[0770] Cotyledonary petioles and hypocotyls of 5-6 day old young seedling are used as explants for tissue culture and transformed according to Babic et al. (1998, Plant Cell Rep 17: 183-188). The commercial cultivar Westar (Agriculture Canada) is the standard variety used for transformation, but other varieties can also be used. Canola seeds are surface-sterilized for in vitro sowing. The cotyledon petiole explants with the cotyledon attached are excised from the in vitro seedlings, and inoculated with Agrobacterium (containing the expression vector) by dipping the cut end of the petiole explant into the bacterial suspension. The explants are then cultured for 2 days on MSBAP-3 medium containing 3 mg/l BAP, 3% sucrose, 0.7 Phytagar at 23° C., 16 hr light. After two days of co-cultivation with Agrobacterium, the petiole explants are transferred to MSBAP-3 medium containing 3 mg/l BAP, cefotaxime, carbenicillin, or timentin (300 mg/l) for 7 days, and then cultured on MSBAP-3 medium with cefotaxime, carbenicillin, or timentin and selection agent until shoot regeneration. When the shoots are 5-10 mm in length, they are cut and transferred to shoot elongation medium (MSBAP-0.5, containing 0.5 mg/l BAP). Shoots of about 2 cm in length are transferred to the rooting medium (MS0) for root induction. The rooted shoots are transplanted to soil in the greenhouse. T1 seeds are produced from plants that exhibit tolerance to the selection agent and that contain a single copy of the T-DNA insert.

### Alfalfa Transformation

[0771] A regenerating clone of alfalfa (Medicago sativa) is transformed using the method of (McKersie et al., 1999 Plant Physiol 119: 839-847). Regeneration and transformation of alfalfa is genotype dependent and therefore a regenerating plant is required. Methods to obtain regenerating plants have been described. For example, these can be selected from the cultivar Rangelander (Agriculture Canada) or any other commercial alfalfa variety as described by Brown DCW and A Atanassov (1985. Plant Cell Tissue Organ Culture 4: 111-112). Alternatively, the RA3 variety (University of Wisconsin) has been selected for use in tissue culture (Walker et al., 1978 μm J Bot 65:654-659). Petiole explants are cocultivated with an overnight culture of Agrobacterium tumefaciens C58C1 pMP90 (McKersie et al., 1999 Plant Physiol 119: 839-847) or LBA4404 containing the expression vector. The explants are cocultivated for 3 d in the dark on SH induction medium containing 288 mg/L Pro, 53 mg/L thioproline, 4.35 g/L K2SO4, and 100 μm acetosyringinone. The explants are washed in half-strength Murashige-Skoog medium (Murashige and Skoog, 1962) and plated on the same SH induction medium without acetosyringinone but with a suitable selection agent and suitable antibiotic to inhibit Agrobacterium growth. After several weeks, somatic embryos are transferred to BOi2Y development medium containing no growth regulators, no antibiotics, and 50 g/L sucrose. Somatic embryos are subsequently germinated on half-strength Murashige-Skoog medium. Rooted seedlings were transplanted into pots and grown in a greenhouse. T1 seeds are produced from plants that exhibit tolerance to the selection agent and that contain a single copy of the T-DNA insert.

### Cotton Transformation

[0772] Cotton is transformed using Agrobacterium tumefaciens according to the method described in U.S. Pat. No. 5,159,135. Cotton seeds are surface sterilised in 3% sodium hypochlorite solution during 20 minutes and washed in distilled water with 500 μg/ml cefotaxime. The seeds are then transferred to SH-medium with 50 μg/ml benomyl for germination. Hypocotyls of 4 to 6 days old seedlings are removed, cut into 0.5 cm pieces and are placed on 0.8% agar. An Agrobacterium suspension (approx. 108 cells per ml, diluted from an overnight culture transformed with the gene of interest and suitable selection markers) is used for inoculation of the hypocotyl explants. After 3 days at room temperature and lighting, the tissues are transferred to a solid medium (1.6 g/l Gelrite) with Murashige and Skoog salts with B5 vitamins (Gamborg et al., Exp. Cell Res. 50:151-158 (1968)), 0.1 mg/l 2,4-D, 0.1 mg/l 6 -furfurylaminopurineand 750 μg/ml MgCL2, and with 50 to 100 μg/ml cefotaxime and 400-500 μg/ml carbenicillin to kill residual bacteria. Individual cell lines are isolated after two to three months (with subcultures every four to six weeks) and are further cultivated on selective medium for tissue amplification (30° C., 16 hr photoperiod). Transformed tissues are subsequently further cultivated on non-selective medium during 2 to 3 months to give rise to somatic embryos. Healthy looking embryos of at least 4 mm length are transferred to tubes with SH medium in fine vermiculite, supplemented with 0.1 mg/l indole acetic acid, 6 furfurylaminopurine and gibberellic acid. The embryos are cultivated at 30° C. with a photoperiod of 16 hrs, and plantlets at the 2 to 3 leaf stage are transferred to pots with vermiculite and nutrients. The plants are hardened and subsequently moved to the greenhouse for further cultivation.

### Example 10

### Phenotypic Evaluation Procedure

### 10.1 Evaluation Setup

[0773] Approximately 35 independent T0 rice transformants were generated. The primary transformants were transferred from a tissue culture chamber to a greenhouse for growing and harvest of T1 seed. Six events, of which the T1 progeny segregated 3:1 for presence/absence of the transgene, were retained. For each of these events, approximately 10 T1 seedlings containing the transgene (hetero- and homo-zygotes) and approximately 10 T1 seedlings lacking the transgene (nullizygotes) were selected by monitoring visual marker expression. The transgenic plants and the corresponding nullizygotes were grown side-by-side at random positions. Greenhouse conditions were of shorts days (12 hours light), 28° C. in the light and 22° C. in the dark, and a relative humidity of 70%. Plants grown under non-stress conditions were watered at regular intervals to ensure that water and nutrients were not limiting and to satisfy plant needs to complete growth and development.

[0774] Four T1 events were further evaluated in the T2 generation following the same evaluation procedure as for the T1 generation but with more individuals per event. From the stage of sowing until the stage of maturity the plants were passed several times through a digital imaging cabinet. At each time point digital images (2048×1536 pixels, 16 million colours) were taken of each plant from at least 6 different angles.

### Drought Screen

[0775] Plants from T2 seeds were grown in potting soil under normal conditions until they approached the heading stage. They were then transferred to a “dry” section where irrigation was withheld. Humidity probes were inserted in randomly chosen pots to monitor the soil water content (SWC). When SWC went below certain thresholds, the plants were automatically re-watered continuously until a normal level was reached again. The plants were then re-transferred again to normal conditions. The rest of the cultivation (plant maturation, seed harvest) was the same as for plants not grown under abiotic stress conditions. Growth and yield parameters were recorded as detailed for growth under normal conditions.

### Nitrogen Use Efficiency Screen

[0776] Rice plants from T2 seeds are grown in potting soil under normal conditions except for the nutrient solution. The pots are watered from transplantation to maturation with a specific nutrient solution containing reduced N nitrogen (N) content, usually between 7 to 8 times less. The rest of the cultivation (plant maturation, seed harvest) is the same as for plants not grown under abiotic stress. Growth and yield parameters are recorded as detailed for growth under normal conditions.

### Salt Stress Screen

[0777] Plants are grown on a substrate made of coco fibers and argex (3 to 1 ratio). A normal nutrient solution is used during the first two weeks after transplanting the plantlets in the greenhouse. After the first two weeks, 25 mM of salt (NaCl) is added to the nutrient solution, until the plants are harvested. Seed-related parameters are then measured.

### 10.2 Statistical Analysis: F Test

[0778] A two factor ANOVA (analysis of variants) was used as a statistical model for the overall evaluation of plant phenotypic characteristics. An F test was carried out on all the parameters measured of all the plants of all the events transformed with the gene of the present invention. The F test was carried out to check for an effect of the gene over all the transformation events and to verify for an overall effect of the gene, also known as a global gene effect. The threshold for significance for a true global gene effect was set at a 5% probability level for the F test. A significant F test value points to a gene effect, meaning that it is not only the mere presence or position of the gene that is causing the differences in phenotype.

[0779] Where two experiments with overlapping events were carried out, a combined analysis was performed. This is useful to check consistency of the effects over the two experiments, and if this is the case, to accumulate evidence from both experiments in order to increase confidence in the conclusion. The method used was a mixed-model approach that takes into account the multilevel structure of the data (i.e. experiment-event-segregants). P values were obtained by comparing likelihood ratio test to chi square distributions.

### 10.3 Parameters Measured

### Biomass-Related Parameter Measurement

[0780] From the stage of sowing until the stage of maturity the plants were passed several times through a digital imaging cabinet. At each time point digital images (2048×1536 pixels, 16 million colours) were taken of each plant from at least 6 different angles.

[0781] The plant aboveground area (or leafy biomass) was determined by counting the total number of pixels on the digital images from aboveground plant parts discriminated from the background. This value was averaged for the pictures taken on the same time point from the different angles and was converted to a physical surface value expressed in square mm by calibration. Experiments show that the aboveground plant area measured this way correlates with the biomass of plant parts above ground. The above ground area is the area measured at the time point at which the plant had reached its maximal leafy biomass. The early vigour is the plant (seedling) aboveground area three weeks post-germination. Increase in root biomass is expressed as an increase in total root biomass (measured as maximum biomass of roots observed during the lifespan of a plant (RootMax)), or as the maximum biomass of roots with a thickness above a certain threshold observed during the lifespan of a plant (RootThickMax); or as an increase in the root/shoot index (measured as the ratio between root mass and shoot mass in the period of active growth of root and shoot).

[0782] Early vigour was determined by counting the total number of pixels from aboveground plant parts discriminated from the background. This value was averaged for the pictures taken on the same time point from different angles and was converted to a physical surface value expressed in square mm by calibration. The results described below are for plants three weeks post-germination.

### Seed-Related Parameter Measurements

[0783] The mature primary panicles were harvested, counted, bagged, barcode-labelled and then dried for three days in an oven at 37° C. The panicles were then threshed and all the seeds were collected and counted. The filled husks were separated from the empty ones using an air-blowing device. The empty husks were discarded and the remaining fraction was counted again. The filled husks were weighed on an analytical balance. The number of filled seeds was determined by counting the number of filled husks that remained after the separation step. The total seed yield was measured by weighing all filled husks harvested from a plant. Total seed number per plant was measured by counting the number of husks harvested from a plant. Thousand Kernel Weight (TKW) is extrapolated from the number of filled seeds counted and their total weight. The Harvest Index (HI) in the present invention is defined as the ratio between the total seed yield and the above ground area (mm²), multiplied by a factor 10⁶. The total number of flowers per panicle as defined in the present invention is the ratio between the total number of seeds and the number of mature primary panicles. The seed fill rate as defined in the present invention is the proportion (expressed as a %) of the number of filled seeds over the total number of seeds (or florets).

### Examples 11

### Results of the Phenotypic Evaluation of the Transgenic Plants

[0784] 1. FSM1-like (Fruit Sant/Myb) Polypeptides

[0785] The results of the evaluation of transgenic rice plants expressing SEQ ID NO: 1 under non-stress conditions are presented below. T1 plants exhibited increased seed yield and increased root biomass, and these observations were confirmed in a second evaluation with T2 plants, Tables E1 and E2 list the parameters for which the overall increase was at least 5%.

TABLE E1
Data summary for transgenic rice plants of the
T1 generation; for each parameter the overall
percent increase is shown and for each
parameter the p-value is <0.05.

| Parameter | Overall |
|---|---|
| Fillrate | 19.9 |
| RootThickMax | 6.5 |

TABLE E2
Data summary for transgenic rice plants of the T2 generation;
for each parameter the overall percent increase is shown
and for each parameter the p-value is <0.05.

| Parameter | Overall |
|---|---|
| RootMax | 7.5 |
| Fillrate | 12.5 |

[0786] Furthermore, T1 plants had increased total seed weight (+17.1% overall increase, p<0.05), increased Harvest Index (+16.5% overall increase, p<0.05), increased number of filled seeds (+17.9% overall increase, p<0.05) and increased number of flowers per panicle (+10.6% overall increase, p<0.05). In addition, one of the tested lines in both T1 and T2 generation showed increased early vigour.

2. PIF3-like (Phytochrome Interacting Factor 3) Polypeptides (Drought Stress)

[0787] Transgenic rice plants expressing SEQ ID NO: 293 under control of the rice GOS2 promoter and grown under drought stress showed increased Thousand Kernel Weight in both T1 and T2 generation, the overall increase in T2 was 6.6% with a p-value <0.05. The plants also had increased early vigour, with an overall increase of 27.7% in T2 (p-value <0.05)

### 3. UROD (Uroporphyrinogen III Decarboxylase) Polypeptide

[0788] a. Results Under Normal Growth Conditions

[0789] As shown in the tables below, transgenic rice expressing the UROD gene of SEQ ID NO: 367 under the control of the constitutive GOS2 promoter, and grown under normal conditions as described hereinabove, showed improved yield-related traits compared to control plants (corresponding nullizygotes).

[0790] Positive tendencies were observed in a first evaluation in some lines for the following parameters: aboveground area/biomass, emergence vigour, early flowering, total weight of seeds, seed fill rate, Thousand Kernel Weight, number of filled seeds, number of flowers per panicle, plant height.

[0791] The parameterFor each parameter, the percentage overall is shown if it reaches p<0.05 and above the 5% threshold.

b. Results Under Drought Conditions

[0792] As shown in the tables below, transgenic rice expressing the UROD gene of SEQ ID NO: 367 under the control of the constitutive GOS2 promoter, and grown under drought conditions as described hereinabove, showed improved yield-related traits compared to control plants (corresponding nullizygotes). For each parameter, the percentage overall is shown if it reaches p<0.05 and above the 5% threshold.

[0793] In a first evaluation the following parameters showed p<0.05 and were above the 5% threshold: total weight of seeds, seed fill rate, harvest index.

### 1st Evaluation

TABLE E3

| Parameter | Overall |
|---|---|
| Total weight seeds | 21.1 |
| Seed filling rate | 33.7 |
| Harvest index | 25.0 |

[0795] In a second evaluation the parameters shown in the table below gave p<0.05 and were above the 5% threshold.

[0796] Although there was a decrease in the number of first panicles, there was an increase in the number of flowers per panicle.

### 2nd Evaluation

TABLE E4

| Parameter | Overall |
|---|---|
| Aboveground area | 6.6 |
| Emergence Vigour | 11.0 |
| Number of panicles | −14.0 |
| Number of flowers | 12.8 |
| per panicle | |

### 4. AS-MTT (Abiotic Stress Membrane Tethered Transcription Factor) Polypeptides

[0798] The results of the evaluation of transgenic rice plants in the T1 generation and expressing a nucleic acid comprising the longest Open Reading Frame in SEQ ID NO: 536 under the drought screen growth conditions as specified above are presented below. See previous Examples for details on the generations of the transgenic plants.

[0799] The results of the evaluation of transgenic rice plants under non-stress conditions are presented below. An increase of at least 5% was observed for root biomass (RootMax), root to shoot index (RootShInd), total weight of seeds (totalwgseeds), seed filling rate (fillrate), harvest index (harvestindex), thousand kernel weight (TKW), number of filled seeds (nrfilledseed), Gravity center (GravityYMax), Thick roots (RootThickMax).

[0800] Gravity center (GravityYMax) is a measurement that correlate with increased in seed size and weight and a change in the shape of the canopy of the plant, such that the plant height and/or the leaf angle are altered in such a way that gravity center of the canopy is higher.

[0801] RootThickMax is a measure of the proportion of thick roots compared to the thin roots in the root system of a plant. The proportion of thick roots is typically used as a measure for the biomass of roots above a given thickness threshold. It is typically used as a measure for estimating soil penetration, plant stability, nutrient uptake, water uptake, and tolerance to biotic and abiotic stresses.

TABLE E5

| Parameter | Overall |
|---|---|
| RootMax | 6.9 |
| RootShInd | 7.6 |
| totalwgseeds | 27.1 |
| fillrate | 24.5 |
| harvestindex | 32.1 |
| TKW | 5.6 |
| nrfilledseed | 21.6 |
| GravityYMax | 6.2 |
| RootThickMax | 11.7 |

### 5. EXO-1 Polypeptide

[0802] The results of the evaluation of transgenic rice plants in the T1 generation and expressing a nucleic acid comprising the longest Open Reading Frame in SEQ ID NO: 762 under non-stress conditions are presented below. See previous Examples for details on the generations of the transgenic plants.

[0803] The results of the evaluation of transgenic rice plants under non-stress conditions are presented below (Table E6). An increase of at least 5% was observed for aboveground biomass (AreaMax), total root biomass (RootMax), root-shoot index (RootShInd), yield per plant (totalwgseeds), fill rate (fillrate), harvest index (harvestindex), greenness of a plant before flowering (GNbfFlow), height of the plant (HeightMax; GravityYMax) and of 3,3% for thousand kernel weight (TKW).

TABLE E6
Data summary for transgenic rice plants; for each parameter,
the overall percent increase relative to the wild type plant
is shown. For each parameter the p-value is <0.05.

| Parameter | Overall |
|---|---|
| AreaMax | 10.2 |
| RootMax | 12.5 |
| RootShInd | 6.2 |
| totalwgseeds | 19.7 |
| fillrate | 6.3 |
| harvestindex | 12.1 |
| TKW | 3.3 |
| GNbFlow | 6.6 |
| HeightMax | 5.4 |
| GravityYMax | 10.6 |

### 6. YiAP2 Polypeptides

[0804] The results of the evaluation of transgenic rice plants in the T1 generation and expressing a nucleic acid comprising the longest Open Reading Frame in SEQ ID NO: 835 under the control of the GOS2 promoter and grown under non-stress conditions are presented below. See previous Examples for details on the generations of the transgenic plants. An increase of at least 5% was observed for aboveground biomass (AreaMax), emergence vigour (early vigour), total seed yield (totalwgseeds), number of filled seeds (nrfilledseed), fill rate (fillrate), number of flowers per panicle, harvest index (harvestindex).

[0805] Table E7: Data summary for transgenic rice plants; for each parameter (yield trait), the overall percent increase is shown for the evaluation of plants of the T generation), for each parameter the p-value is <0.05.

TABLE E7

| Parameter | Overall increase |
|---|---|
| totalwgseeds | 26.5 |
| fillrate | 13.8 |
| harvestindex | 23.3 |
| nrfilledseed | 24.0 |

The application's sequence listing, which the Patent Office published only in electronic form, follows.

SEQUENCE LISTING (897 sequences)

SEQ ID NO: 1 - DNA, 267 bp, Solanum lycopersicum
atgagctcgatgtcgtctcaacatggttcttctggatcatggactgcgaaacaaaacaaggcgtttgagaaggcattggctgtgtatgacaaggaaactcgcgatcgttggtccaatgttgctaaagcagttggaggcaaaacagcagaagaagtgaaaagacactatgaaatccttttgagggatgttttctttattgacaatggtatggtgcccttccccaaatacaaaactactggaggatcccataattccacctctgattaa

SEQ ID NO: 2 - protein, 88 aa, Solanum lycopersicum
MSSMSSQHGSSGSWTAKQNKAFEKALAVYDKETRDRWSNVAKAVGGKTAEEVKRHYEILLRDVFFIDNGMVPFPKYKTTGGSHNSTSD

SEQ ID NO: 3 - DNA, 285 bp, Antirrhinum majus
atggcttcgagttcattgagttcgcgaaggccaggttcatggacgccacaagagaacaaattgttcgagaaggccttagcccggttcgaccaggacacacccgacaggtggcagaacgtggctagggcggttggtggcggtaagtcggcggaggaagtgaagaggcactaccatattctcatcgaggatcttcgtcgtatagaatccggtgatgtgcccttgccaaagtacaagaacaccaatgccgacgaagaaaaaaggcttctaaaatacctgaagatgtaa

SEQ ID NO: 4 - protein, 94 aa, Antirrhinum majus
MASSSLSSRRPGSWTPQENKLFEKALARFDQDTPDRWQNVARAVGGGKSAEEVKRHYHILIEDLRRIESGDVPLPKYKNTNADEEKRLLKYLKM

SEQ ID NO: 5 - DNA, 282 bp, Antirrhinum majus
atggcttcgactcgtggttctggccgcccttggtccgccaaggagaacaaagccttcgaaagagcattggcggtttacgacaaagacaccccagaccgttgggctaacgtggctagggccgtggagggacgaacaccggaagaagtgaagaagcactatgaaattctagtggaggatatcaagtatattgagagtgggaaagtgcccttccccaactacaggaccaccggtggtaacatgaaaactgacgagaaaaggttcagaaatctcaaaattcggtaa

SEQ ID NO: 6 - protein, 93 aa, Antirrhinum majus
MASTRGSGRPWSAKENKAFERALAVYDKDTPDRWANVARAVEGRTPEEVKKHYEILVEDIKYIESGKVPFPNYRTTGGNMKTDEKRFRNLKIR

SEQ ID NO: 7 - DNA, 303 bp, Arabidopsis thaliana
atggcctctagttctatgagctcgagctcttcttggacgtctaagcaaaacaagatgttcgagagggctttagccgtttacgataaagacactcccgaccgttggcaaaacgtggctaaagcagttggaagtaaatctgcagaggaagttaaacgtcactacgacatcctcgttgaagatctcatgaacatcgaacaagacttagtacctttgcctaaatacaaaaccgtcgatgttggaagtaaatctagaggcatcgatgattttgatttgaggttaatgaagaatatgagaatccagtga

SEQ ID NO: 8 - protein, 100 aa, Arabidopsis thaliana
MASSSMSSSSSWTSKQNKMFERALAVYDKDTPDRWQNVAKAVGSKSAEEVKRHYDILVEDLMNIEQDLVPLPKYKTVDVGSKSRGIDDFDLRLMKNMRIQ

SEQ ID NO: 9 - DNA, 294 bp, Arabidopsis thaliana
atggcgtcaaactcaagaagttcaatctcaccatggacgtttagtcaaaacaagatgttcgagagggccttggcagtttacgacaaggacacacccgaccgatggcacaatgtggcaaaagctgtcggagggaaaactgtagaagaagtgaagcgccactatgacattctcgtcgaggatctcatcaacatcgagactggtcgtgtccctttgcccaattacaagaccttcgaatctaactcaagaagcatcaatgactttgacacaaggaaaatgaagaatttgaagatctaa

SEQ ID NO: 10 - protein, 97 aa, Arabidopsis thaliana
MASNSRSSISPWTFSQNKMFERALAVYDKDTPDRWHNVAKAVGGKTVEEVKRHYDILVEDLINIETGRVPLPNYKTFESNSRSINDFDTRKMKNLKI

SEQ ID NO: 11 - DNA, 306 bp, Arabidopsis thaliana
atggcatcaggctcaatgtcttcttatggctctggctcatggactgttaagcagaacaaagcctttgagcgtgctctagcagtctatgaccaagacactccggaccgttggcacaatgttgctagagctgttggtggtaaaacaccagaagaagctaagagacagtatgaccttctagttcgtgacatcgaaagcatcgagaatggtcacgtgccattccctgactacaagactactacaggaaacagcaacagaggcaggctgcgtgatgaggaaaagaggatgagaagcatgaagctgcagtga

SEQ ID NO: 12 - protein, 101 aa, Arabidopsis thaliana
MASGSMSSYGSGSWTVKQNKAFERALAVYDQDTPDRWHNVARAVGGKTPEEAKRQYDLLVRDIESIENGHVPFPDYKTTTGNSNRGRLRDEEKRMRSMKLQ

SEQ ID NO: 13 - DNA, 258 bp, Arabidopsis thaliana
atggcttccaactcaatgagctctagcgcttcttggacacgtaaggagaacaaattatttgaaagggcgttggctacatatgaccaggacactcctgaccgttggcataacgttgcaagagccgttggcggcaaatcagctgaagaaaatatcacaacaattatccataagaaagcattcataaataatagacatgcactctccagtttcttatgcgtgtcttcttgtttcaccaggccagagaaaaaaaaaatctag

SEQ ID NO: 14 - protein, 85 aa, Arabidopsis thaliana
MASNSMSSSASWTRKENKLFERALATYDQDTPDRWHNVARAVGGKSAEENITTIIHKKAFINNRHALSSFLCVSSCFTRPEKKKI

SEQ ID NO: 15 - DNA, 303 bp, Arabidopsis thaliana
atggcatcaagctcaatgtcttctcagagctctggctcgtggactgctaagcagaacaaagcctttgagcaggctctagcaacctatgaccaggacactcctaaccgttggcaaaatgttgccaaagtcgtgggtggaaaaacaacagaggaggtaaagagacactacgaactcttagtgcaagacatcaacagcatagagaacggtcatgttccattcccaaactacaggactagtggaggctgcactaatggcaggcttagtcaggaggaaaaaaggatgagaaacatgaggctgcagtaa

SEQ ID NO: 16 - protein, 100 aa, Arabidopsis thaliana
MASSSMSSQSSGSWTAKQNKAFEQALATYDQDTPNRWQNVAKVVGGKTTEEVKRHYELLVQDINSIENGHVPFPNYRTSGGCTNGRLSQEEKRMRNMRLQ

SEQ ID NO: 17 - DNA, 303 bp, Brassica napus
atggcatcaaactcaatgtctgcttatggatctggctcatggactgttaagcagagcaaagcctttgagagtgctctagcaacctatgaccaggactcccctgaccgttggtacaatgtcgctagagctgttggtgggacaacaccagatgaagctaagagacaatacgagcttctcgtacgtgacatagaaagcattgagaatgggcacgtggcattccctaactacaagactaatggaggcagcactaagggcaggctgcgtgatgaggaaaaaaggatgagaagcatgaagctgcagtga

SEQ ID NO: 18 - protein, 100 aa, Brassica napus
MASNSMSAYGSGSWTVKQSKAFESALATYDQDSPDRWYNVARAVGGTTPDEAKRQYELLVRDIESIENGHVAFPNYKTNGGSTKGRLRDEEKRMRSMKLQ

SEQ ID NO: 19 - DNA, 240 bp, Brassica napus
atggcttccaactccatgagttctaacgcgtcttggacacgtaaggagaacaaactatttgaaagggctttggctatatatgaccaggacactcctgaccgttggcataacgttgctagagcagttggtgggaaatcagctgaagaagtaaggcgacactacgagctactcattagggatgtcaatgacatcgagtcagggcgttatccacagcctacttaccgttcgaatggaaactga

SEQ ID NO: 20 - protein, 79 aa, Brassica napus
MASNSMSSNASWTRKENKLFERALAIYDQDTPDRWHNVARAVGGKSAEEVRRHYELLIRDVNDIESGRYPQPTYRSNGN

SEQ ID NO: 21 - DNA, 297 bp, Brassica napus
tttatagcactattgcttcaatgtaacagacttcactggatcctcatattcttcattaacctcaaatcgtaatcgttgatgcctcttgatttatttccaacatcgacggtcttgtatttaggcaaagggactaagtcttgctcgatgttcatgagatcttcaacgagaatatcgtagtgacgtttgacttcctctgccgatttattcccgactgctttggccacgttttgccaacggtctggagtgtctttgtcgtaaacggctaaagccctttcgaacatcttattttgcttagac

SEQ ID NO: 22 - protein, 98 aa, Brassica napus
MASSSMSSSWTSKQNKMFERALAVYDKDTPDRWQNVAKAVGNKSAEEVKRHYDILVEDLMNIEQDLVPLPKYKTVDVGNKSRGINDYDLRLMKNMRIQ

SEQ ID NO: 23 - DNA, 297 bp, Brassica napus
atggcctcaagttctatgagctcctcttggacgtctaagcaaaataagatattcgaaagggctttagccgtttacgacaaagacactccagaccgttggcaaaacgtggccaaagccgtcgggaataaatcggcagaggaagtcaaacgtcactacgatattctcgttgaagatctcatgaacatcgagcaagacttagtccctttgcctaaatacaagaccgtcgatgttggaaataaatcaagaggcatcaacggttacggtttgaggttaatgaaaaatattgaggtccagtga

SEQ ID NO: 24 - protein, 98 aa, Brassica napus
MASSSMSSSWTSKQNKIFERALAVYDKDTPDRWQNVAKAVGNKSAEEVKRHYDILVEDLMNIEQDLVPLPKYKTVDVGNKSRGINGYGLRLMKNIEVQ

SEQ ID NO: 25 - DNA, 237 bp, Capsicum annuum
atggcatcaaattcactcagtgcttggaccccaagagaaaacaagaaattcgagcaggcacttgctgtgtatgataaggatacacctgatcgctggcaaaacattgctagatacgttggtggaaaatcagttgaagaagttaaacatcactatgctatccttgtggaggatctcaaacacattgagtctggcgacgtcccattcccaaaatacaagtcagatggaaagtctcgttaa

SEQ ID NO: 26 - protein, 78 aa, Capsicum annuum
MASNSLSAWTPRENKKFEQALAVYDKDTPDRWQNIARYVGGKSVEEVKHHYAILVEDLKHIESGDVPFPKYKSDGKSR

SEQ ID NO: 27 - DNA, 261 bp, Citrus clementina
atggcatccaacactatgacttcttcacgcagctctggctcatcctggactgtcaaacagaacaaacaattcgagacagctctggccttttatgacaaggacacccctgaccgctgggacaatgttgctaaggctgttagcggcaaaacagtcgaagacgtcaagaaacattatgaactgctcgttaaggatatcaatgacattgaagctggcaggtatccccaccccaactatcgctctactactggaaccggaaactga

SEQ ID NO: 28 - protein, 86 aa, Citrus clementina
MASNTMTSSRSSGSSWTVKQNKQFETALAFYDKDTPDRWDNVAKAVSGKTVEDVKKHYELLVKDINDIEAGRYPHPNYRSTTGTGN

SEQ ID NO: 29 - DNA, 249 bp, Cichorium intybus
atggcatctagctcaatgtcttcacgtgggtcaggatcatggacggctaaacagaacaaggcctttgagaaggctttggctgtatttgacaaagatacccctgaccgctggcataatgttgccaaggctgttggtggaaaaacagcagaggaagtgaagcaccattatgaagttcttgtagaagatgtgaagcatattgagaatggtcgagttccattccctaattacaggacgactggaggggcataa

SEQ ID NO: 30 - protein, 82 aa, Cichorium intybus
MASSSMSSRGSGSWTAKQNKAFEKALAVFDKDTPDRWHNVAKAVGGKTAEEVKHHYEVLVEDVKHIENGRVPFPNYRTTGGA

SEQ ID NO: 31 - DNA, 240 bp, Centaurea maculosa
atggcatcaaactccctctattcaagcagctccagctcctcgtggacacctcagcagaacaagctatttgaaagagcccttgcagtgtatgatagagatacccctgaccgttggcagaagattgcaagggcagtgggtggcaaatctgcagaagaagtgaagaggcactatgaagtgctcattgaagacctcaggcacatagagtctggcaatgttccttttcctaactacagacgctaa

SEQ ID NO: 32 - protein, 79 aa, Centaurea maculosa
MASNSLYSSSSSSSWTPQQNKLFERALAVYDRDTPDRWQKIARAVGGKSAEEVKRHYEVLIEDLRHIESGNVPFPNYRR

SEQ ID NO: 33 - DNA, 261 bp, Citrus sinensis; identical to SEQ ID NO: 27

SEQ ID NO: 34 - protein, 86 aa, Citrus sinensis; identical to SEQ ID NO: 28

SEQ ID NO: 35 - DNA, 243 bp, Eucalyptus grandis
atggcatcgaattctctgacttcttcatcctggacgccgaagcagaacaagatgttcgagaaggcattggctcaatatgacaaggacactcccgacaggtggcagaagattgccaaggccgtgggtgggaaatctgcagatgaagtgaaaagacactatgaaattttaatcgaggacgtcaagcacatcgagtctggcagagttccttttcctaattacaggtcgagcaacaatagtggctga

SEQ ID NO: 36 - protein, 80 aa, Eucalyptus grandis
MASNSLTSSSWTPKQNKMFEKALAQYDKDTPDRWQKIAKAVGGKSADEVKRHYEILIEDVKHIESGRVPFPNYRSSNNSG

SEQ ID NO: 37 - DNA, 309 bp, Eucalyptus gunnii
atgggtgaatttcccaatgggtggagttgggaagagaacaagctgtttgaggtggctctggcgatggtggatgaacaagacccagatcggtgggaggtggtcgcggccattgtcggagggaagaagagtgcagaggaagtgcagagacattatgtaatccttctggaggatttgcacttcattgaatctgggtgtcttgatcacgagctggaggatgctcagtcatatggtcaagttgagtgtattaatcagtcagtgtattggacagacgaggatcaggaattgttcattcagttggacataaactga

SEQ ID NO: 38 - protein, 102 aa, Eucalyptus gunnii
MGEFPNGWSWEENKLFEVALAMVDEQDPDRWEVVAAIVGGKKSAEEVQRHYVILLEDLHFIESGCLDHELEDAQSYGQVECINQSVYWTDEDQELFIQLDIN

SEQ ID NO: 39 - DNA, 258 bp, Eucalyptus gunnii
atggcatccagttcaatgtcgaggggttcgagctcgtggacggcgaagcagaacaaggcgtttgaggaggcactggcggtgtacgacaaggacacgccagaccgctggcacaatgtggccaaagccgtgggtggcaaaactgctgaggaggtgaagaggcattatgagttgcttgtggaggatgtgaagcatattgagtctggccgagtccctttccctaattacaggacaaccgggcggggaaacgttaatggatga

SEQ ID NO: 40 - protein, 85 aa, Eucalyptus gunnii
MASSSMSRGSSSWTAKQNKAFEEALAVYDKDTPDRWHNVAKAVGGKTAEEVKRHYELLVEDVKHIESGRVPFPNYRTTGRGNVNG

SEQ ID NO: 41 - DNA, 240 bp, Eucalyptus tereticornis
atgggtgaatttcccaatgggtggagttgggaagagaacaagctgtttgaggtggctctggcgatggtggatgaacaagacccagatcggtgggaggtggtcgcggccattgtcggagggaagaagagtgcaaaggaagtgcagagacattatgtaatccttctggaggatttgcacttcattgaatctgggtgtcttgatcaccaactggaggatgctcaatcatatggtcaaagttga

SEQ ID NO: 42 - protein, 79 aa, Eucalyptus tereticornis
MGEFPNGWSWEENKLFEVALAMVDEQDPDRWEVVAAIVGGKKSAKEVQRHYVILLEDLHFIESGCLDHQLEDAQSYGQS

SEQ ID NO: 43 - DNA, 288 bp, Festuca arundinacea
atggcgtcgatgtcggtgaactcgacgaggccgcagtggacggcgaagcagaacaagcagttcgagcaggcgctggcggtgtacgacaaggagacgccggaccggtggcacaacatcgcgcgcgccgtgggtggcaagtccgccgacgaggtcaggcgctactacgagctgctcgtagaggacgtcaagcgcatcgaggccggcagggtgcccttcccggcgtacaggtgccccggcgccgccatgggcgggtacgaggccgacaggctgaagcacctgaagatctag

SEQ ID NO: 44 - protein, 95 aa, Festuca arundinacea
MASMSVNSTRPQWTAKQNKQFEQALAVYDKETPDRWHNIARAVGGKSADEVRRYYELLVEDVKRIEAGRVPFPAYRCPGAAMGGYEADRLKHLKI

SEQ ID NO: 45 - DNA, 246 bp, Fragaria vesca
atggcatccaactcactctcttcacgaagctcgagctcctcatggactcctaagcagaacaaacagttcgaaaaggcactagccttgtacgacaaggatacccctgaccgctggcagaaggtggccagagccgtgggagggaagtccgcggaggaggtgaagaggcactatgagattctcattgaggatgtcaagcacattgagtctggtagaatcccatatcctgattacaggaacagtgactaa

SEQ ID NO: 46 - protein, 81 aa, Fragaria vesca
MASNSLSSRSSSSSWTPKQNKQFEKALALYDKDTPDRWQKVARAVGGKSAEEVKRHYEILIEDVKHIESGRIPYPDYRNSD

SEQ ID NO: 47 - DNA, 246 bp, Gossypium hirsutum
atgtcatcgaattcaatgtctgcttcatggacagccaagcaaaacaaagatttcgaaagggctttagctgtttacgacaaggacacaccagatcgttggtacaatgttgctaaagctgtgggagggaaaactgttgaggaagtgaagaagcactatgagcttcttctggaagatgttagacacatcgagtcgggtcgggttcctttccccgactattggaccgttaccgggaatcgtcaagcatga

SEQ ID NO: 48 - protein, 81 aa, Gossypium hirsutum
MSSNSMSASWTAKQNKDFERALAVYDKDTPDRWYNVAKAVGGKTVEEVKKHYELLLEDVRHIESGRVPFPDYWTVTGNRQA

SEQ ID NO: 49 - DNA, 258 bp, Gossypium hirsutum
atggcatcctctattacgctttcacgtgattctaactcctactggactccaaagcaaaacaagctatttgaaagggcacttgctgtatatgacaaggacactccagaccgctggcaaaaggtggctgcagctgtgggggagaaatcagtcgaggaagtaagaaggcattatgagatcctagtgagggatctcatgtatatagaatctggtcaaatccctatacccaattacaaaagcactgggagtaacagaagatga

SEQ ID NO: 50 - protein, 85 aa, Gossypium hirsutum
MASSITLSRDSNSYWTPKQNKLFERALAVYDKDTPDRWQKVAAAVGEKSVEEVRRHYEILVRDLMYIESGQIPIPNYKSTGSNRR

SEQ ID NO: 51 - DNA, 252 bp, Gossypium hirsutum
atgtcatccaattttctcaataattcacgctgctctagctcttcctggacacctaaacaaaacaaaacgttcgagaaggctctggctaaatatgaccagtacactcctgaccgctgggacaatgttgccaaagctgtgggtggaaagtctgctgaggaagacaagctgcactatgatgccctagtcagggatctcagagacattgagtctggccgctacccttatccatatgcaagtggaagcaacagctaa

SEQ ID NO: 52 - protein, 83 aa, Gossypium hirsutum
MSSNFLNNSRCSSSSWTPKQNKTFEKALAKYDQYTPDRWDNVAKAVGGKSAEEDKLHYDALVRDLRDIESGRYPYPYASGSNS

SEQ ID NO: 53 - DNA, 261 bp, Gossypium hirsutum
atggcatcaagctcaatgtcgtcccaaggttctagttcatggacagccaaacaaaacaaagattttgaaaaagttttggctgtttatgacaaggacacacctgaccgttggtacaatgttgccaaggctatcggagggaaaaccgcggaggaagtgaagaggcactatgaactgcttgtgaaagatgtgaagcaaattgaatcaggcaaagtgccattccctaactataggaccactggtggcagcaacacccaaggatga

SEQ ID NO: 54 - protein, 86 aa, Gossypium hirsutum
MASSSMSSQGSSSWTAKQNKDFEKVLAVYDKDTPDRWYNVAKAIGGKTAEEVKRHYELLVKDVKQIESGKVPFPNYRTTGGSNTQG

SEQ ID NO: 55 - DNA, 282 bp, Gossypium hirsutum
atggcctcaggttcgagctggacaccaaagcaaaacaagttgttcgagaatgctttagttatctacgacaaagataccccagaccgctggcacaatctagccagggcagttggagggaaaaccgtggaggaagtgaagctacattaccagaaccttgtcgaagacatccaacagattgagtctggccaagtgcccttacctccttacaagaaagctggagggaacaaaggatacaatttcacggatggagaacaaagaatgaggaatctgaggcttcagtga

SEQ ID NO: 56 - protein, 93 aa, Gossypium hirsutum
MASGSSWTPKQNKLFENALVIYDKDTPDRWHNLARAVGGKTVEEVKLHYQNLVEDIQQIESGQVPLPPYKKAGGNKGYNFTDGEQRMRNLRLQ

SEQ ID NO: 57 - DNA, 243 bp, Gossypium hirsutum
atggcatcgagctcaatgtcgtcccgtggttcaggttcatggacagccaaacaaaacaaagactttgaaagggctttggctgtgtatgataaggacacccctgaccgttggtacaatgttgccaaagctgttggtgggaaaactgctgaggaagttaagaggcactatgagctgcttgtggctgatgtcaagtatattgaatcaggccaagttcccttcccttacaggtccaatggaaattag

SEQ ID NO: 58 - protein, 80 aa, Gossypium hirsutum
MASSSMSSRGSGSWTAKQNKDFERALAVYDKDTPDRWYNVAKAVGGKTAEEVKRHYELLVADVKYIESGQVPFPYRSNGN

SEQ ID NO: 59 - DNA, 264 bp, Gossypium hirsutum
atggcatcgaactttttcacttcttcacgtgcttccaactcctactggacgccttaccaaaacaagctatttgagaaggcactagcagtatatgacaaggacacccctgaccggtggcaaaaagtggcggctgctgtgggcgagaaatcggccgaggaagtaagaaagcactatgaggtcctagtggaagatctcatgtatattgaatctggtaaaatacctatacccaattacaaaagcactgctgggagttacagaagatga

SEQ ID NO: 60 - protein, 87 aa, Gossypium hirsutum
MASNFFTSSRASNSYWTPYQNKLFEKALAVYDKDTPDRWQKVAAAVGEKSAEEVRKHYEVLVEDLMYIESGKIPIPNYKSTAGSYRR

SEQ ID NO: 61 - DNA, 315 bp, Gossypium hirsutum
atggataagttccctgatgttctgtgtggttggagctgggaggagaacaagttgtttgagctggctttagcagtggtcgatgaacaacaccctgatcgttgggaagtggtagccagcatggttggaggggaaaaaactgcagaagatgtgcataaacattatgtcatacttttggaggatttgcagtttatcgaatcgggtaaactcgaccataaacttgccgaaactcagtcctgtattcaactggactgcactcaatctgtatgctggactgatgatgataacaacttgctggttcgattagacataaattga

SEQ ID NO: 62 - protein, 104 aa, Gossypium hirsutum
MDKFPDVLCGWSWEENKLFELALAVVDEQHPDRWEVVASMVGGEKTAEDVHKHYVILLEDLQFIESGKLDHKLAETQSCIQLDCTQSVCWTDDDNNLLVRLDIN

SEQ ID NO: 63 - DNA, 261 bp, Gossypium hirsutum
atgtcgtcaagttctaggacttcttcacgtgattctaactcctactggactccaaagcaaaacaaactgtttgaaaaggcccttgctgtatatgacagggacactccggaccgctggcaaaaagtggcagcggctgttggtgataaaacacccgaggaagtgcgaaggcactatgagatcttagtgacggatgtcaaccatattgaatctggtcaaatccctatacccgattatgaaagcactgggaacaacagtagatga

SEQ ID NO: 64 - protein, 86 aa, Gossypium hirsutum
MSSSSRTSSRDSNSYWTPKQNKLFEKALAVYDRDTPDRWQKVAAAVGDKTPEEVRRHYEILVTDVNHIESGQIPIPDYESTGNNSR

SEQ ID NO: 65 - DNA, 210 bp, Glycine max
atggcatcatcttggacgccaaggcaaaacaaactatttgaagaggcccttgctatacatgatagggaaactcctgacaggtggcagaatgtggcaagagtagtgggaaaatccgttgaggatgttaaaagacactatgaaatcctcaaagaagatatcaagcgaattgagcgtggtcaaattccattacctaactatacaggttcttga

SEQ ID NO: 66 - protein, 69 aa, Glycine max
MASSWTPRQNKLFEEALAIHDRETPDRWQNVARVVGKSVEDVKRHYEILKEDIKRIERGQIPLPNYTGS

SEQ ID NO: 67 - DNA, 285 bp, Glycine max
atgacatcctacacactttcttctcctaacaccagtctaagatggacaactgagaagaacaaactgtttgagaatgccttggcaatatatgacaaggatacccctgagcgttggaacaacatagccatgtttgttggaggcacaactgaagttgaagtcaagagacaatatgagatactcctagaggacatcaaaaacattgaatcgggcaaggttccactccctgattacacgagaaatgctggatgtggcaaactaaacatcagcagtgcagaacaaaggtga

SEQ ID NO: 68 - protein, 94 aa, Glycine max
MTSYTLSSPNTSLRWTTEKNKLFENALAIYDKDTPERWNNIAMFVGGTTEVEVKRQYEILLEDIKNIESGKVPLPDYTRNAGCGKLNISSAEQR

SEQ ID NO: 69 - DNA, 222 bp, Glycine max
atggcatcatcttggaccccaaggcaaaacaaactgtttgaaagagccctggctaaatatgatagagaaaccccagataggtggcagaatgttgccaacgaggtgggaaaatcggtagaggaggttaaaaggcactatgagatcctcaaagaagatatcagacgcattgagcgtggtcaagtggcattcccctacagaacaagcaattctaacagtaattaa

SEQ ID NO: 70 - protein, 73 aa, Glycine max
MASSWTPRQNKLFERALAKYDRETPDRWQNVANEVGKSVEEVKRHYEILKEDIRRIERGQVAFPYRTSNSNSN

SEQ ID NO: 71 - DNA, 222 bp, Glycine max
atggcatcatcttggactccacggcagaacaaattgtttgaacaagccctggctttatatgacagggaaacccctgacagatggcagaatgtggccaatgtggtgggaagatcagttgaggatgttaaaaggcactatgagatcctcaaagaagatgtcaaacgcattgaacatggccaagttccatttcctcgttacaaaaccaacaccagcaacaactaa

SEQ ID NO: 72 - protein, 73 aa, Glycine max
MASSWTPRQNKLFEQALALYDRETPDRWQNVANVVGRSVEDVKRHYEILKEDVKRIEHGQVPFPRYKTNTSNN

SEQ ID NO: 73 - DNA, 282 bp, Glycine max
atggcatcaagctcaatgtcagctactggatcatggagtgctaaggacaacaaggcctttgaaagggctttagctgtttatgacaaggacaccccggaccgttggaaagatgttgcccgtgctgttggcgggaaaactcctgatgaagtgaagagccactatgagctcctcctcagagacattagccaaattgaatcaggcaaagtgccatacccaaattacaagaaaagtgcagagcatgatgaagaggagaaaaggatgagaaacctgaagatccagtga

SEQ ID NO: 74 - protein, 93 aa, Glycine max
MASSSMSATGSWSAKDNKAFERALAVYDKDTPDRWKDVARAVGGKTPDEVKSHYELLLRDISQIESGKVPYPNYKKSAEHDEEEKRMRNLKIQ

SEQ ID NO: 75 - DNA, 318 bp, Glycine max
atggcttcaaactcccacaacaataacaaggaaattttttcctcttggacacgcatgcagaacaagcaattcgaaagcgcacttgccttgtatgatcaagacaccccagatcgatggcaaaacatagcaaaagtggttggtgataaatcggctgaggaagtgaagagacactatgaaatccttttggaggaccttaggcatatagagtctggacgtgttccaattcccagctataagtccacagataataatcaagagagggagatgaatgctaaagattgtaataagaaaactacatatttatacttgaaaaactaa

SEQ ID NO: 76 - protein, 105 aa, Glycine max
MASNSHNNNKEIFSSWTRMQNKQFESALALYDQDTPDRWQNIAKVVGDKSAEEVKRHYEILLEDLRHIESGRVPIPSYKSTDNNQEREMNAKDCNKKTTYLYLKN

SEQ ID NO: 77 - DNA, 294 bp, Glycine max
atggcatccagttcaatctcagcctctggctcatggagtgttaaggacaacaaggcctttgaaaaggctttagctgtttatgacaaggacactcctgaccgttggtacaatgttgctcatgctgttggtggcaaaactccagaggaagtgaaaaggcactacgaactccttgttcaggatgttaagcatattgagtctggacgtgtgccattcccaaattacaagaaaactacttcagggtcaactgatcaggaggaaaaaaggctgaggaatttgaatttgaacctccagtga

SEQ ID NO: 78 - protein, 97 aa, Glycine max
MASSSISASGSWSVKDNKAFEKALAVYDKDTPDRWYNVAHAVGGKTPEEVKRHYELLVQDVKHIESGRVPFPNYKKTTSGSTDQEEKRLRNLNLNLQ

SEQ ID NO: 79 - DNA, 279 bp, Glycine max
atggcatctagctcaatgtcatccactggctcatggagtaccaaggacaacaaggccttcgaaagggctctagctgtgtatgacaaggacactcccgaccgttggtacaatgttgctaaggctgttggaggagggaagactccagaggaagtgaagaggcactatgagctccttctcagggatgttaggtacattgaatcagggaaagtgccattcccatacaagcaaagtggagggtctgaagaagagaaaaggctgagaaacatgaagctccagtga

SEQ ID NO: 80 - protein, 92 aa, Glycine max
MASSSMSSTGSWSTKDNKAFERALAVYDKDTPDRWYNVAKAVGGGKTPEEVKRHYELLLRDVRYIESGKVPFPYKQSGGSEEEKRLRNMKLQ

SEQ ID NO: 81 - DNA, 429 bp, Glycine max
atggcctcaagtcagggttggactccgaagcagaacaagagatttgagaatgcccttgccatcttcgacaaggacaccccagacaggtggcacacggtggccagggccgtcggaggaaaaacggtggaggaagtgaaaaggcattatgagaagctcgtggaagatgtgaaggagattgaggaaggtcacgtgcccctccccaattaccgaagtgctgcaagaggccacgttaattattaccataatattagtccaatgcaaatcactttaaacataaaagtgagaaggctatttcacacaaaattggcactccatgctgacgaaatcaaccagacaacttttggaatgctgaagtttcgaatggagtattcttatattaaaattgtatccattcttaatctatatactttagaaaaatatactttttaa

SEQ ID NO: 82 - protein, 142 aa, Glycine max
MASSQGWTPKQNKRFENALAIFDKDTPDRWHTVARAVGGKTVEEVKRHYEKLVEDVKEIEEGHVPLPNYRSAARGHVNYYHNISPMQITLNIKVRRLFHTKLALHADEINQTTFGMLKFRMEYSYIKIVSILNLYTLEKYTF

SEQ ID NO: 83 - DNA, 279 bp, Glycine max
atggcatctagctcaatgtcatccactggctcatggagtgccaaggacaacaaagcctttgaaagggctctagctgtgtatgacaaggacacgccggaccgttggtacaatgttgctaaggctgttgctgttgggaagactcctgaggaagtcaagaggcactatgaactcctccttagggatgttaggcacattgaatcagggcaagtgccattcccatacaagcaaaatggagggtctcaagaggagaaaaggctgagaaacatgaagctccagtaa

SEQ ID NO: 84 - protein, 92 aa, Glycine max
MASSSMSSTGSWSAKDNKAFERALAVYDKDTPDRWYNVAKAVAVGKTPEEVKRHYELLLRDVRHIESGQVPFPYKQNGGSQEEKRLRNMKLQ

SEQ ID NO: 85 - DNA, 393 bp, Glycine max
atggcgtcaagctctctcagcaaacaaaaggcttctgactcctcttggacaccaaaacagaacaagctgtttgaaaaagcacttgcaaaatatgacaaggatacccctgaccgatggcagaatgtagccaaagcagtaggtggaaaatctgcagatgaagttaagagacactatgaaatcctcttggaggatctgagacacattgagtctggtcatgttcctcttcccaagtacaagtccacaggaagcagcaccaatgttgaggaagaagagagaaaggaaaagaagagaccactaactaaaatcattgacaccttttttcaatttttgaatgtttttacacgtcactttcaaaattccacactcaattatttagttacctattcaatttga

SEQ ID NO: 86 - protein, 130 aa, Glycine max
MASSSLSKQKASDSSWTPKQNKLFEKALAKYDKDTPDRWQNVAKAVGGKSADEVKRHYEILLEDLRHIESGHVPLPKYKSTGSSTNVEEEERKEKKRPLTKIIDTFFQFLNVFTRHFQNSTLNYLVTYSI

SEQ ID NO: 87 - DNA, 294 bp, Glycine max
atggcctcaagctcagcttggacaacaaagcagaacaaaaagtttgagaatgctttggccatctacgacagggatacccccgatcggtggcagaacttggccagggcggtgggaggtaagactgtggaggaagtgaaaaggcactatgagatgctcgttgatgatttgaagcagattgaagaaggtcacgtgcccttgcccaattacagaaatgctgctgcaacaggaggaggcagcatcagaggttatagttacatggatgaagaacaaaggttgaaatcaaatttttattga

SEQ ID NO: 88 - protein, 97 aa, Glycine max
MASSSAWTTKQNKKFENALAIYDRDTPDRWQNLARAVGGKTVEEVKRHYEMLVDDLKQIEEGHVPLPNYRNAAATGGGSIRGYSYMDEEQRLKSNFY

SEQ ID NO: 89 - DNA, 222 bp, Glycine max
atggcatcatcttggaccccaaggcaaaataaacaatttgaaagagccctggctaaatatgatagagaaaccccagatagatggcagaatgttgctaacgaggtgggaaaatcggttgaggaggttaaaaggcactatgagatcctcaaagaagatatcagacgcattgagcgtggtcaagtggcattcccctacagaacaaacaattctaacagtaattaa

SEQ ID NO: 90 - protein, 73 aa, Glycine max
MASSWTPRQNKQFERALAKYDRETPDRWQNVANEVGKSVEEVKRHYEILKEDIRRIERGQVAFPYRTNNSNSN

SEQ ID NO: 91 - DNA, 267 bp, Glycine max
atggcttcaaattccttgaacaatagtaacaacaaagaacattttccctcttggaccagattgcagaacaaacaatttgaaaaggcattggtcttgtacgatgaacacacccgagatcggtggcaaaatatagctaaagaagttggcaataaatcggtggaggaagtgaagagacactatgcaattcttttagaagatcttagtagaatggagtcagggcgtgttccaattcctgattataagttctcagaaaacatggatatatga

SEQ ID NO: 92 - protein, 88 aa, Glycine max
MASNSLNNSNNKEHFPSWTRLQNKQFEKALVLYDEHTRDRWQNIAKEVGNKSVEEVKRHYAILLEDLSRMESGRVPIPDYKFSENMDI

SEQ ID NO: 93 - DNA, 282 bp, Helianthus argophyllus
atggcatcaagttctatgacgtcttcacgtagctccgggtccacatggacacagaggcaaaacaagcagtttgaagaggctttagcttactacaacaaggacagtcccgacaggtggcacaacattgctagggctgttggtggaaagtcagttgaggaggtgaagaggcattatgaaatccttgtgagggacatcatgcagattgaatcagatcaagttcctttacctaactatcgcagtattggaagcaacgggcgtggattcgcaaacgaacaaaggtag

SEQ ID NO: 94 - protein, 93 aa, Helianthus argophyllus
MASSSMTSSRSSGSTWTQRQNKQFEEALAYYNKDSPDRWHNIARAVGGKSVEEVKRHYEILVRDIMQIESDQVPLPNYRSIGSNGRGFANEQR

SEQ ID NO: 95 - DNA, 234 bp, Helianthus exilis
atgtcttcacgtgggtcaggttcatggactgtgaagcagaataaggactttgaagaggctttggctgtgtttgacaaagacacccctgaccgctggcgcaatgttgcaaaggctgtcggtgggaagaccgcagaggaagtgaagaggcattatgaaatcctagtgggggatgtgaaactcattgagagcggtcgagttcctttccccaattataggaccactaatggggcatga

SEQ ID NO: 96 - protein, 77 aa, Helianthus exilis
MSSRGSGSWTVKQNKDFEEALAVFDKDTPDRWRNVAKAVGGKTAEEVKRHYEILVGDVKLIESGRVPFPNYRTTNGA

SEQ ID NO: 97 - DNA, 261 bp, Hordeum vulgare
atggcctggagcgacgcagagaacgagaggttcgagcgcgcgctggccacgtacggccgcgacacagccggtctctgggagcgcgtggcggcagcggtcggcggcggcaagacggccgacgacgtcaggcgccactacgacctgctgacgcaggacatcggcgacatcgagtccggccgctacggttaccccaacggcggagccaacagcagcaccaaccccaacaacggcaggaacagggccaaccggccccagacatga

SEQ ID NO: 98 - protein, 86 aa, Hordeum vulgare
MAWSDAENERFERALATYGRDTAGLWERVAAAVGGGKTADDVRRHYDLLTQDIGDIESGRYGYPNGGANSSTNPNNGRNRANRPQT

SEQ ID NO: 99 - DNA, 255 bp, Hordeum vulgare
atgtcttctgggtctacgagctcatcccgtggcggcgccaacgcggtgtggagcgtcagggagaacaagctgttcgaggaggcactcgccaactacggcgagggcacgcccgaccgctggcacaaggtgtcgcgcgccatgggcgggaccaagacggccgacgaggtgcgcaaccactatgagatcctcgaggaagacatcaagctcatcgagtctggcagggtcccgttccccaagtacaagtacaggaactga

SEQ ID NO: 100 - protein, 84 aa, Hordeum vulgare
MSSGSTSSSRGGANAVWSVRENKLFEEALANYGEGTPDRWHKVSRAMGGTKTADEVRNHYEILEEDIKLIESGRVPFPKYKYRN

SEQ ID NO: 101 - DNA, 255 bp, Ipomoea batatas
atggcctctaattccctgtcgtcgcgtggcgccggcgcgtcatcatgcactgccgacctaaacaaacaattcgaggaggctcttgcccgccacgaccgcgacacgcctgaccgctggcaaaacattgccagggaagtcggcaaatcacccgccgaggtcaagcacctctacgacatcctcgtacacgaccttaaacacatcgagtctggggacgtccctgtcccaaactacaggtccaccggaacccgccgttga

SEQ ID NO: 102 - protein, 84 aa, Ipomoea batatas
MASNSLSSRGAGASSCTADLNKQFEEALARHDRDTPDRWQNIAREVGKSPAEVKHLYDILVHDLKHIESGDVPVPNYRSTGTRR

SEQ ID NO: 103 - DNA, 252 bp, Ipomoea nil
atggcgtcagattccctgtcgtcgcgtgcctcatcatcatggactgccgaccaaaacaaacaattcgaggaggctcttgcccgccacgaccgcgacacgcctgaccgctggcaaaacattgccagggaagtcggcaaatcaccagccgaggtcaagcaactctacgacatcctcgtacacgaccttaaacacatcgagtctggggacgtccctgtcccaaactacaggtccaccggaacccgccgccgttga

SEQ ID NO: 104 - protein, 83 aa, Ipomoea nil
MASDSLSSRASSSWTADQNKQFEEALARHDRDTPDRWQNIAREVGKSPAEVKQLYDILVHDLKHIESGDVPVPNYRSTGTRRR

SEQ ID NO: 105 - DNA, 303 bp, Lactuca perennis
atggcatcaggctctatgacatcttcacgtagctctggatcttcctggactccaagacaaaacaagcagtttgaagatgctttagcttactacaacaaggacactcctgatcgctggcataacattgccagggctgtcggtggaaaatcagtggaggaggtgaagaggcattatgaaatcctcgagagggatgtcatgcaaattgaattagatcaagttcctttacccaattatagggatattggaagcaacggacgtggatttggaaatgaacagaggcttctgaagaatctaaagctataa

SEQ ID NO: 106 - protein, 100 aa, Lactuca perennis
MASGSMTSSRSSGSSWTPRQNKQFEDALAYYNKDTPDRWHNIARAVGGKSVEEVKRHYEILERDVMQIELDQVPLPNYRDIGSNGRGFGNEQRLLKNLKL

SEQ ID NO: 107 - DNA, 252 bp, Lactuca sativa
atggcatctagctcaatgtcttcacgtgggtcgggttcatggactgctaaacagaacaaagcctttgagaaggctttggctgtgtttgacaaagatacccctgatcgatggcataatgtagccaaagctgttggtggcaaaacagctgaggaagtgaagcagcattatgaagtccttgtggaggatgtgaagcacattgaaaatggtcgagttcctttccctaattacaggagaaccaccggagggggatag

SEQ ID NO: 108 - protein, 83 aa, Lactuca sativa
MASSSMSSRGSGSWTAKQNKAFEKALAVFDKDTPDRWHNVAKAVGGKTAEEVKQHYEVLVEDVKHIENGRVPFPNYRRTTGGG

SEQ ID NO: 109 - DNA, 252 bp, Lactuca serriola
atggcatctagctcaatgtcttcacgtgggtcgggttcatggactgctaaacagaacaaagccttcgagaaggctttggctgtgtttgacaaagatacccctgatcgatggcataatgtagccaaagctgttggtggcaaaacagctgaggaagtgaagcagcattatgaagtccttgtggaggatgtgaagcacattgaaaatggtcgagttcctttccctaattacaggagaaccaccggagggggatag

SEQ ID NO: 110 - protein, 83 aa, Lactuca serriola; identical to SEQ ID NO: 108

SEQ ID NO: 111 - DNA, 252 bp, Lactuca virosa; identical to SEQ ID NO: 107

SEQ ID NO: 112 - protein, 83 aa, Lactuca virosa; identical to SEQ ID NO: 108

SEQ ID NO: 113 - DNA, 240 bp, Musa acuminata
atggcatccggttcgatgagctcctcctggaccgcgaaggagaacaagatgttcgagaaggcactggcggtgtacgacagggacacccccgaccgctggcacaagatcgcccgggccatcggcgggaagacggcggacgaagtgaagcgctactacgacctgctcgtggaggacgtgcgccgcatcgaggctggccaaatgccgtacgccaattaccggtcctctaatggcagaggttga

SEQ ID NO: 114 - protein, 79 aa, Musa acuminata
MASGSMSSSWTAKENKMFEKALAVYDRDTPDRWHKIARAIGGKTADEVKRYYDLLVEDVRRIEAGQMPYANYRSSNGRG

SEQ ID NO: 115 - DNA, 309 bp, Malus domestica
atggcatcaagctcaatgtcctcaagaggctctggctcctcctggactgccaagcaaaacaaagcctttgaaaaggctctggctgtctacgacaaggacactgctgaccgctggtacaatgtggccaaagcggtcggcggcaaaacaccggaggaagtcaagaggcactatgaggttcttgtggaagatgtcaagcatattgagtcaggccaggtgcccttcccagattacaggactactggtgggaacagccatggccaccacatgagtgatgaggaaaagaggatgagaaacctcaagcttcactga

SEQ ID NO: 116 - protein, 102 aa, Malus domestica
MASSSMSSRGSGSSWTAKQNKAFEKALAVYDKDTADRWYNVAKAVGGKTPEEVKRHYEVLVEDVKHIESGQVPFPDYRTTGGNSHGHHMSDEEKRMRNLKLH

SEQ ID NO: 117 - DNA, 309 bp, Malus domestica
atggcatcggtttcttcctcgaggaatttcaactcctcgtggacgccgaaggagaacaagctgttcgagaaggcgctggccgtgtacgacaaggacacgcaggaccgctggcataatgtggccaaggccgtcggcggaaaatctgcggaggaagtaaagaggcactacgagattctggtgcatgatctcatgcacatagaatccggccatgtccctataccaaattataagtccgccggcggcagcggcagcggcagcaacagaggatttggtgacgagcagaggcttatgaaaaatttgaagatctga

SEQ ID NO: 118 - protein, 102 aa, Malus domestica
MASVSSSRNFNSSWTPKENKLFEKALAVYDKDTQDRWHNVAKAVGGKSAEEVKRHYEILVHDLMHIESGHVPIPNYKSAGGSGSGSNRGFGDEQRLMKNLKI

SEQ ID NO: 119 - DNA, 258 bp, Manihot esculenta
atgtcttcaagctacctcgcttcaagctccttttggtctccatccgaaaacaaactgtttgaggaggccctagccttgtatgataaggaaacaccagatcgctgggaaaatatagccagagctgttgggggcaaatcagcagatgaagtcaagagacactacgagatccttcttgaagatgttaagcacatcgagtctggtcgtgttccctttcctaactataaattatctggtggaagcccaagcaatggtaattaa

SEQ ID NO: 120 - protein, 85 aa, Manihot esculenta
MSSSYLASSSFWSPSENKLFEEALALYDKETPDRWENIARAVGGKSADEVKRHYEILLEDVKHIESGRVPFPNYKLSGGSPSNGN

SEQ ID NO: 121 - DNA, 252 bp, Mimulus guttatus
atggcatcaagctctgcgaatcgtgactcgggaagaaaatggaccgcgaaggagaacaaagacttcgaggaggcattggccgaattcgacaaagacacacccgagcggtggtcaaacgttgctcgagcagtcggtactcgaacggtggaggaagttaagaaacactacgaagttctcctcgaagattttaataaaatcgagagtggtaaggtacccttgcccaattacaagaccacttgtggaagtttttaa

SEQ ID NO: 122 - protein, 83 aa, Mimulus guttatus
MASSSANRDSGRKWTAKENKDFEEALAEFDKDTPERWSNVARAVGTRTVEEVKKHYEVLLEDFNKIESGKVPLPNYKTTCGSF

SEQ ID NO: 123 - DNA, 276 bp, Medicago truncatula
atggcatcaatgtcagcatctggttcatggagtgctaaggacaataaagcatttgaaagggcactagctgtttttgataaagacacacctgaccgttggtccaatgttgctcaagctgttggtggtgggaagactcctgaggatgttaagagacactatgaacacctcctaagggatgttaggcacattgaatcaggtcaagttgcattcccaaattacaagaacattggaggctatgatgaggaaaaaaggttgagaaacctaaagctccagtaa

SEQ ID NO: 124 - protein, 91 aa, Medicago truncatula
MASMSASGSWSAKDNKAFERALAVFDKDTPDRWSNVAQAVGGGKTPEDVKRHYEHLLRDVRHIESGQVAFPNYKNIGGYDEEKRLRNLKLQ

SEQ ID NO: 125 - DNA, 279 bp, Medicago truncatula
atggcatctagctcaatgtcagcttctggctcatggagtgttaaggagaataaagcctttgaaagagctttagctgtttatgacaaagacacaccagatcgttggtacaatgtagctcatgctgttggtggcaaaactcctgaggaagttaagaaacactatgaacttcttgttgaggatattaaacatattgagtcagggaaagttccatttccaaattacaagaaaatttcagtgtctcatgaggagaaaaggatgaggaacatgagccttcattga

SEQ ID NO: 126 - protein, 92 aa, Medicago truncatula
MASSSMSASGSWSVKENKAFERALAVYDKDTPDRWYNVAHAVGGKTPEEVKKHYELLVEDIKHIESGKVPFPNYKKISVSHEEKRMRNMSLH

SEQ ID NO: 127 - DNA, 219 bp, Medicago truncatula
atgggatcaacttggactccaaggcaaaacaaacaatttgaaagagctttggctatatatgatagagaatctccagataagtggcagaatgttgccaacatggtgggaaaatcagttgaagatgttaaaaggcattatgaaatcctcaaagaagatgttaggcgcattgagcatggtcaagttgcattcccttacagaacaaataatgctaataactga

SEQ ID NO: 128 - protein, 72 aa, Medicago truncatula
MGSTWTPRQNKQFERALAIYDRESPDKWQNVANMVGKSVEDVKRHYEILKEDVRRIEHGQVAFPYRTNNANN

SEQ ID NO: 129 - DNA, 219 bp, Medicago truncatula
atggcaacctcttggactgcaaggcagaacaaactgtttgaacaagcattggctttatatgatagagaaactcctgaaagatggcacaatgtggccaaagtggttggaaaatcagttgaagatgttaagagtcactatgagatcctcaaagaagatgttcaacgtattgagcatggccatatcccttttcctcgttacaaaactaacaccaactcctaa

SEQ ID NO: 130 - protein, 72 aa, Medicago truncatula
MATSWTARQNKLFEQALALYDRETPERWHNVAKVVGKSVEDVKSHYEILKEDVQRIEHGHIPFPRYKTNTNS

SEQ ID NO: 131 - DNA, 294 bp, Medicago truncatula
atgacatccaagacatcatccaacatgctttcttctcctaactcaagtctacaatggacaaccaagaagaacaaactatttgaaaatgcattggcaatatatgacaaggaaacttctgaccgttggtacaatatagccatgtttgttggagggacaactgaagtggaaatcaagaagcattatgagatacttcaagaagacatcaaaaacattgagtcaggcaaagttcccctacctgcttacagaagaagaaatactggatgcagcaatgtaaacatcagcagtgcaaattaa

SEQ ID NO: 132 - protein, 97 aa, Medicago truncatula
MTSKTSSNMLSSPNSSLQWTTKKNKLFENALAIYDKETSDRWYNIAMFVGGTTEVEIKKHYEILQEDIKNIESGKVPLPAYRRRNTGCSNVNISSAN

SEQ ID NO: 133 - DNA, 276 bp, Medicago truncatula
atggcttcaagttcgaattggacaacaaagcagaacaaaagatttgagaatgcgttggcaatgttggacaaggacactcctgatctttggcagaaggtggctagagctgtgggagggaagactgttgaagaagtgaaaaggcattatgaggaccttgttgaagatgttaggcagatcgaggaaggccatgttcccctgcctaattacacaaataatgttggttacagttacataatggatcaagataaaaggatgaaggctctaagtctccactaa

SEQ ID NO: 134 - protein, 91 aa, Medicago truncatula
MASSSNWTTKQNKRFENALAMLDKDTPDLWQKVARAVGGKTVEEVKRHYEDLVEDVRQIEEGHVPLPNYTNNVGYSYIMDQDKRMKALSLH

SEQ ID NO: 135 - DNA, 246 bp, Nicotiana benthamiana
atgagctcaatgtcctcacaacatggctctggctcttggacagcaaaacagaataaggcatttgagaaggcattggctgtatatgacaaagatacttgtgatcgttggtccaatgttgccaaagctgttggaggaaaaactgctgaagaagtgaaacaacactatgaaatccttgtgcacgatgttctctatattgaaaatggtagagtgcccttccccaaatacaagactactactcgagaataa

SEQ ID NO: 136 - protein, 81 aa, Nicotiana benthamiana
MSSMSSQHGSGSWTAKQNKAFEKALAVYDKDTCDRWSNVAKAVGGKTAEEVKQHYEILVHDVLYIENGRVPFPKYKTTTRE

SEQ ID NO: 137 - DNA, 276 bp, Oryza minuta
atgtcttctgggtcaagcagctcctcccgcaacagcaacagtgtcaacatggagtcagagtggagcaaaaaggagaacaagctgttcgaggaggctcttgcctactacggcgacggcgcgcctgacctctttcacaaagtttcccgcgccatgggaggcaccaagacagccgatgaggtgcgccgccactatgagatcctcgaggacgatctcaagctgatagaggcaagaagagtcccattccccaagtacaatacacagggagcatggaactga

SEQ ID NO: 138 - protein, 91 aa, Oryza minuta
MSSGSSSSSRNSNSVNMESEWSKKENKLFEEALAYYGDGAPDLFHKVSRAMGGTKTADEVRRHYEILEDDLKLIEARRVPFPKYNTQGAWN

SEQ ID NO: 139 - DNA, 282 bp, Oryza sativa
atggcatccagctccaaggcctcgtcctcgtcgtcggcgtcggcggcgtcgtcggagtggacgaagcagcagaacaagcagttcgagcgcgccctggcggtgtacgacaccgacgccccggaccggtggcacaacgtcgcccgctacatgggcggcgccaagtccgccgaggaggtgcgccgccactacgagcggctccaggcggatgtcgagcagattgaggccggcggcgtgccgttctccttgggctacggcgccacgccacaggccggccgccgctag

SEQ ID NO: 140 - protein, 93 aa, Oryza sativa
MASSSKASSSSSASAASSEWTKQQNKQFERALAVYDTDAPDRWHNVARYMGGAKSAEEVRRHYERLQADVEQIEAGGVPFSLGYGATPQAGRR

SEQ ID NO: 141 - DNA, 258 bp, Oryza sativa
atggcgtcgatgtcggtgagctcgtcgagggcgccgcagtggacggcgaggcagaacgagcagttcgagcgggcgctggcggtgtacgacagggacacgccggagcggtggcacaacatcgcgcgcgccgttgcggggaagtccgccgacgaggtgaagctctactacgacctgctcgtggaggacgtcaagcgcatcgagaccgggaaggtgcccttccccgcgtacaggtgcccccagcccgcgattgcaggctga

SEQ ID NO: 142 - protein, 85 aa, Oryza sativa
MASMSVSSSRAPQWTARQNEQFERALAVYDRDTPERWHNIARAVAGKSADEVKLYYDLLVEDVKRIETGKVPFPAYRCPQPAIAG

SEQ ID NO: 143 - DNA, 276 bp, Oryza sativa
atgtcttctaggtcaagcagctcctcccgcaacagcaacagtgtcaacatggactcagagtggagcaaaaaggagaacaagctgttcgaggaggctcttgcctactacggcgagggcgcgcctgacctctttcacaaggtgtctcgcgccatgggaggcaccaagacagccgatgaggtgcgccgccactatgagatcctcgaggacgacctcaagctgatagaggcaagaagagtcccgttccccaagtacaatacacagggagcatggaactga

SEQ ID NO: 144 - protein, 91 aa, Oryza sativa
MSSRSSSSSRNSNSVNMDSEWSKKENKLFEEALAYYGEGAPDLFHKVSRAMGGTKTADEVRRHYEILEDDLKLIEARRVPFPKYNTQGAWN

SEQ ID NO: 145 - DNA, 306 bp, Oryza sativa
atgagttcatcctggacaacaaagcagaataaggtgtttgagagggcgctggcaatatatgacagggatacgccagatcgctggcagaatgtggcacgggcagttggtggtggaaagtcagttgatgatgtgaagaggcactatgaaaagctgatcaaggacgtggatcgcattgactctacaggaggccatcaaggatcccattacaacagctccaatgctagcagcagcagcagcagcagcagcagcaactctcggggcagtgccaatgaggaccagaggaggaggtaccacaactttcagtga

SEQ ID NO: 146 - protein, 101 aa, Oryza sativa
MSSSWTTKQNKVFERALAIYDRDTPDRWQNVARAVGGGKSVDDVKRHYEKLIKDVDRIDSTGGHQGSHYNSSNASSSSSSSSSNSRGSANEDQRRRYHNFQ

SEQ ID NO: 147 - DNA, 258 bp, Oryza sativa
atgtctgggtcccggagctcctcccccaactcgaagtctgagtggagcaggaaggagaacaagatgttcgaggaggcgctcgcctactacggcgaggacacgcccaaccggtgggacaaggtggccagcgccatgggaggcatcaagtccgctgaggagatccgctgccactacgaagacctcaccgatgacgtcaagacgatcgagtccgggcgagtgcagttccccaagtacaagacgcagggatactggacctga

SEQ ID NO: 148 - protein, 85 aa, Oryza sativa
MSGSRSSSPNSKSEWSRKENKMFEEALAYYGEDTPNRWDKVASAMGGIKSAEEIRCHYEDLTDDVKTIESGRVQFPKYKTQGYWT

SEQ ID NO: 149 - DNA, 336 bp, Oryza sativa
atggcgtcggcggccggctcgaagcagcagcaggcgatgatgtcgttgccgtcgtcccgcggcggcggcggcggcgggtggacgcagcggcagaacaagcagttcgagtgcgcgctggcggtgtacgacaaggagacgccggaccggtggcacaacatcgcccgctacatgggcggcgccaagtccgccgacgaggtccgccgccacttcgaccacctcgtcgaggacgtctcccgcatcgagtccggccgcgtccccttcccccgctactcctcctcctcctcctcccgcggagccgacgacggaaacagatctaggtacctgaagtatcagtga

SEQ ID NO: 150 - protein, 111 aa, Oryza sativa
MASAAGSKQQQAMMSLPSSRGGGGGGWTQRQNKQFECALAVYDKETPDRWHNIARYMGGAKSADEVRRHFDHLVEDVSRIESGRVPFPRYSSSSSSRGADDGNRSRYLKYQ

SEQ ID NO: 151 - DNA, 252 bp, Oryza sativa
atgggttcgtcgtggacactcgatcagaacaaggtctttgagctggcgctggcgacatacggcaaggacacgccggaccgctgggaaaatgtggcgcgggcggtgggcggtggcaagacagcggatgatgcgaagaggcactataagaagctggaaaatgacatcggccgcattgattcaacaggtgccagcagcagcaactccaatggccgtagcagcagtgaggggcagaggtacctcaagccccagtga

SEQ ID NO: 152 - protein, 83 aa, Oryza sativa
MGSSWTLDQNKVFELALATYGKDTPDRWENVARAVGGGKTADDAKRHYKKLENDIGRIDSTGASSSNSNGRSSSEGQRYLKPQ

SEQ ID NO: 153 - DNA, 270 bp, Oryza sativa
atgtcttctgctgggtcacgtagctcgtcccgcaacagcaacatggcgtcagagtggagcaaagaggagaacaagctgttcgagcaggccattgcctactacggcgagggcgcgcctgatctctggcacaaggtgtcccgcgccatggggggcaccaagacagccgacgaggtgcgcctccacttcgagatcctcgtggacgatatcaagctgattgaggcaaggcgagtcccgttccccaagtacaatacacagggagcatggaactga

SEQ ID NO: 154 - protein, 89 aa, Oryza sativa
MSSAGSRSSSRNSNMASEWSKEENKLFEQAIAYYGEGAPDLWHKVSRAMGGTKTADEVRLHFEILVDDIKLIEARRVPFPKYNTQGAWN

SEQ ID NO: 155 - DNA, 330 bp, Oryza sativa
atgagttcatcatggacgacgaagcagaacaagctgttcgagagggcgctggcgacatacgacaaagacacgccgggccgctggcagaacgtggcgcgggcagtgggtggtggaaagacggccgaggaggtgaagaggcactacgacaagctgcttcaagacctgcaccacattgagtcggcaggccgtcagggttcccaatacggcggcagcagcagcagcaaatccaaaggtggcagcagcagcggggagcagagatatcggaacagagactggaagcagcaaccagggctccatagtggtgccgtgaaaagagcctctcagtattag

SEQ ID NO: 156 - protein, 109 aa, Oryza sativa
MSSSWTTKQNKLFERALATYDKDTPGRWQNVARAVGGGKTAEEVKRHYDKLLQDLHHIESAGRQGSQYGGSSSSKSKGGSSSGEQRYRNRDWKQQPGLHSGAVKRASQY

SEQ ID NO: 157 - DNA, 273 bp, Oryza sativa
atggcgcagcaggcaagggcgcagtggccgcagaagcagaacaagctgttcgagcaggcgctggcggtgtacgacaaggagacgcccgaccggtggcacaacatcgcccgcgccgtcggcggcggcaagtcggcggaggacgtcaagcgctactacgagatgctggaggaggacatcaagcacatcgagtccggcaaggtccccttccccgcctaccgctgccccgccgccgccggctaccaggccgaaaggttgaagcatttgaagatctag

SEQ ID NO: 158 - protein, 90 aa, Oryza sativa
MAQQARAQWPQKQNKLFEQALAVYDKETPDRWHNIARAVGGGKSAEDVKRYYEMLEEDIKHIESGKVPFPAYRCPAAAGYQAERLKHLKI

SEQ ID NO: 159 - DNA, 261 bp, Persea americana
atggcatcaagctcaatgcgtagctccaactcatcctggacacccaagcagaacaaactgtttgaggaggcgttggccaggtatgacaaggacacccctgaccgctggcagaatgttgccagggctgtgggtgggaagtccgcagaggaggtgaagaggcactacgagctcctcgtcgaggatctcaagtatattgaatccggccaggtgcctttccccaattacaagtcctctgggggaaggaactccaaaggcttttga

SEQ ID NO: 160 - protein, 86 aa, Persea americana
MASSSMRSSNSSWTPKQNKLFEEALARYDKDTPDRWQNVARAVGGKSAEEVKRHYELLVEDLKYIESGQVPFPNYKSSGGRNSKGF

SEQ ID NO: 161 - DNA, 420 bp, Persea americana
atggcatcaagctcaatgcgtagctccaactcatcctggacacccaagcagaacaaactgtttgaggaggcgttggccaggtatgacaaggacacccctgaccgctggcagaatgttgccaaggctgtgggtgggaagtccgcagaggaggtgaagaggcactacgagctcctcgtcgaggatctcaagtatattgaatccggccaggtgcctttccccaattacaagtcctctgggggaaggaactccaaaggtaacatagaaaatgaccagattattgtgactatctatttagttctcattcccctgctcttcccctcaaatctcatactgagatggaatgaccatccggagatcattctcctgctagagtcttcactgttccatctgttttctgtagttctactaataaaaacttga

SEQ ID NO: 162 - protein, 139 aa, Persea americana
MASSSMRSSNSSWTPKQNKLFEEALARYDKDTPDRWQNVAKAVGGKSAEEVKRHYELLVEDLKYIESGQVPFPNYKSSGGRNSKGNIENDQIIVTIYLVLIPLLFPSNLILRWNDHPEIILLLESSLFHLFSVVLLIKT

SEQ ID NO: 163 - DNA, 303 bp, Phaseolus coccineus
atggcctcaagctctatcaacaaacaaaagccttctgactcctcttggacaccaaaacagaacaaactgtttgaaaaagcacttgcaaaatatgataaggataccccagaccggtggcagaatgtggccacagcagtaggtgacaaatctccagatgaggttaagagacactatgaaatcctcttggaggacctcagacacatagagtctggccgtgttcctctcccgaaatacaggtccactggaagcagcaccaacgttgatgatgaagagagacttctgaagtatcttaagctgaattga

SEQ ID NO: 164 - protein, 100 aa, Phaseolus coccineus
MASSSINKQKPSDSSWTPKQNKLFEKALAKYDKDTPDRWQNVATAVGDKSPDEVKRHYEILLEDLRHIESGRVPLPKYRSTGSSTNVDDEERLLKYLKLN

SEQ ID NO: 165 - DNA, 279 bp, Populus euphratica
atgtcttccagctatcaaactccaaggaattctagcccctcttggacaccaagggaaaacaaactgtttgaaaaggctctagccttgtttgataaggacacaccggaccggtggcaaaatatagccaaagctgttggtggtgtgaaatcagctgaggaagtgaagagacactacgaaatcctcattgaagatctcaaatacatcgagtccggccgtgttcctattcctaattacaagtccagtagaagctgcagcagtacaaacgaagaagaaaggtaa

SEQ ID NO: 166 - protein, 92 aa, Populus euphratica
MSSSYQTPRNSSPSWTPRENKLFEKALALFDKDTPDRWQNIAKAVGGVKSAEEVKRHYEILIEDLKYIESGRVPIPNYKSSRSCSSTNEEER

SEQ ID NO: 167 - DNA, 291 bp, Populus euphratica
atggcttcaggttctagtaattggacttcaaagcaaaacaaactgttcgaaaatgccttggccatctatgatcaagaatctcctgatcgctggcacaatcttgccagggctgttggaaaaacagtggaggaagtgaagaagcattatcagatgcttgttgaagacgtccagcagattgaagctggtgaaatccctttgcccaactacactagaagatctggagctagcaacaaaagctaccattgcattgatgatcaagcaaaaagggtgaagaatcttaatctcaactga

SEQ ID NO: 168 - protein, 96 aa, Populus euphratica
MASGSSNWTSKQNKLFENALAIYDQESPDRWHNLARAVGKTVEEVKKHYQMLVEDVQQIEAGEIPLPNYTRRSGASNKSYHCIDDQAKRVKNLNLN

SEQ ID NO: 169 - DNA, 264 bp, Populus euphratica
atggcatcaagctcaatgtcctctcgcggttcgggctcgtggactgctcagcagaacaaagcctttgaaagggctttggccgtgtatgacagagacacgcccgatcgctggtacaatgtagccagggcggtcggtggaaaaaccgcagaagaagtgaaaaggcactatgaactgcttgtggaggatgtgaagcatattgagtcgggtcatgttcctttccctaattacaggactactggagcaaatggccacgcaagaggatga

SEQ ID NO: 170 - protein, 87 aa, Populus euphratica
MASSSMSSRGSGSWTAQQNKAFERALAVYDRDTPDRWYNVARAVGGKTAEEVKRHYELLVEDVKHIESGHVPFPNYRTTGANGHARG

SEQ ID NO: 171 - DNA, 324 bp, Picea glauca
atggcttgtcaatcagcttcttcatcgggcaagcattcttctaatagtactgcaacaaattggactttcaagcaaaacaaactgtttgaaaacgccttagccatttatgacaaagacactcctgaccgttggcataatgtggcttctgtggttggcgggaaatccccagaggaagtcaagaggcattatgagattctgttggaggacttgaattccattgaagcaggccaggtgcctttccccaaatacatatcttcgaggcctaacaacagggagatcttgggaggaggaaagcctatcctcggtaattctgacaatgcatag

SEQ ID NO: 172 - protein, 107 aa, Picea glauca
MACQSASSSGKHSSNSTATNWTFKQNKLFENALAIYDKDTPDRWHNVASVVGGKSPEEVKRHYEILLEDLNSIEAGQVPFPKYISSRPNNREILGGGKPILGNSDNA

SEQ ID NO: 173 - DNA, 255 bp, Pinus pinaster
atggctggtcaatcagcttcttcatcagcaagttcctcttcctggacttccaagcaaaataaacaatttgagaaggccttagctctctatgacaaggacactcctgaccgttggctcaatgttgcttcgatggttgatgggaaatcaccagaggaagtcaaaaaacattatgagattctggtagaggatttcaagtgcattgaagcaggccaggtgccttgtcccaactacaaatcttcgacaagttcgcggtag

SEQ ID NO: 174 - protein, 84 aa, Pinus pinaster
MAGQSASSSASSSSWTSKQNKQFEKALALYDKDTPDRWLNVASMVDGKSPEEVKKHYEILVEDFKCIEAGQVPCPNYKSSTSSR

SEQ ID NO: 175 - DNA, 369 bp, Pinus taeda
atgttggaaaggtgcagcagagctttggtggaatggagtgccgaggagaacaagattttcgagaatgcattggccatctacggcaaggacacgcctgatcgatggcacaatgtgtcttccatggttggagggaagagcccagaggaagtgaagagacattatgagattctgttagaggatttaagctgcattgaggctggaaaagtgtcaattcccaactatttatttgatattgcaacagatgatgaagtccctgttcatcacaaaaatgcgggaggagaagggcaggtcactgtacctggaagcagcaataatattgtttggactgatgaggaacaaagggttttaaggcgcttgaagatacagtga

SEQ ID NO: 176 - protein, 122 aa, Pinus taeda
MLERCSRALVEWSAEENKIFENALAIYGKDTPDRWHNVSSMVGGKSPEEVKRHYEILLEDLSCIEAGKVSIPNYLFDIATDDEVPVHHKNAGGEGQVTVPGSSNNIVWTDEEQRVLRRLKIQ

SEQ ID NO: 177 - DNA, 240 bp, Populus tremula
atgtctaatttcacgtctacagatggctccggctcctcctgaacagccaaacaaaacaagctattccacaaggccctggctgtatactacaaagacaccccggaccgctggcaaaatgtggccaaggccgccggtggcaagtctcctgaaaaatttaagacgcactatgatcgtctcgtggaagatctcgtgtacatagaatccggcctagcgcctctgccgaatgacaagccctctggc

SEQ ID NO: 178 - protein, 79 aa, Populus tremula
MSNFTSTDGSGSSTAKQNKLFHKALAVYYKDTPDRWQNVAKAAGGKSPEKFKTHYDRLVEDLVYIESGLAPLPNDKPSG

SEQ ID NO: 179 - DNA, 300 bp, Populus tremula
atgtcttatttcacgtcttcaaatggctccggctcctcctggacagccaaacaaaacaagctattcgagaaggccctggctgtatacgacaaagacaccccggaccgctggcaaaatgtggccaaggccgtgggtggcaagtctcctgaagaagttaagaggcactatgatcgtctcgtggaagatctcgtgtacataaaatccggccgaacgcctctgccgaattacaagccctctggcagcaatggtaaaggacttggtgaagagcaaaggcttacgaggaacttgaagctgcaatga

SEQ ID NO: 180 - protein, 99 aa, Populus tremula
MSYFTSSNGSGSSWTAKQNKLFEKALAVYDKDTPDRWQNVAKAVGGKSPEEVKRHYDRLVEDLVYIKSGRTPLPNYKPSGSNGKGLGEEQRLTRNLKLQ

SEQ ID NO: 181 - DNA, 291 bp, Populus trichocarpa
atggcttcaggttctagtaattggacttcaaagcaaaacaaactgttcgaaaatgccttggccatctatgatcaagaatctcctgatcgctggcacaatcttgccagggctgttggaaaaacagtggaggaagtgaagaagcattatcagatgcttgttgaagacgtccagcagattgaagctggtgaaatccctttgcccaactacactagaagatctggagctagcaacaagagctaccattgcaatgatgatcaagcacaaagggtgaagaatcttaatctcaactga

SEQ ID NO: 182 - protein, 96 aa, Populus trichocarpa
MASGSSNWTSKQNKLFENALAIYDQESPDRWHNLARAVGKTVEEVKKHYQMLVEDVQQIEAGEIPLPNYTRRSGASNKSYHCNDDQAQRVKNLNLN

SEQ ID NO: 183 - DNA, 264 bp, Populus trichocarpa
atggcatcaagctcaatgtcctctcgcggttcgggctcgtggactgttcagcagaacaaagcctttgaaagggctttggctgtgtatgacagagacacgcccgatcgctggtacaatgtagccagggcagtcggtggaaaaaccgcagaagaagtgaaaaggcactatgaactgcttgtggaggatgtgaagcatattgagtcgggccatgttcccttccctaattacaggactaccggggcaaatggccacgcaagaggatga

SEQ ID NO: 184 - protein, 87 aa, Populus trichocarpa
MASSSMSSRGSGSWTVQQNKAFERALAVYDRDTPDRWYNVARAVGGKTAEEVKRHYELLVEDVKHIESGHVPFPNYRTTGANGHARG

SEQ ID NO: 185 - DNA, 258 bp, Populus trichocarpa
atggcatccaattctctcaactcttcacgtaactgtagttcctcttggacccccaagcaaaacaaactattcgaaaaggccctggctttgtatgacaaggacacccctgaccgctggcataatgttgccaaagctgtgggtgggaaatctgcagaggaagtggagaggcactatgaaattctcatcaaggatgtcagggaaattgagtctggtcgggttccattccctaattacaggtcaagtggaaacagcaactaa

SEQ ID NO: 186 - protein, 85 aa, Populus trichocarpa
MASNSLNSSRNCSSSWTPKQNKLFEKALALYDKDTPDRWHNVAKAVGGKSAEEVERHYEILIKDVREIESGRVPFPNYRSSGNSN

SEQ ID NO: 187 - DNA, 297 bp, Populus trichocarpa
atggcatcaagctccgtgtcctctcgcggttcgggctcgtggactgctcagcagaacaaagcctttgaaagggctttggctgtttatgacagggacacacccgaccgttggcataatgtagccagggcagttggtggaaaaactgctgaagaagtgaaaaggcattacgaaatcctcgtggaggatgtcaagcatattgagtcaggccgagttcccttccctaattacaggactaccggggcaaatggccactcaaagactggtgaggaaaagatgtatatatatagcagtttataa

SEQ ID NO: 188 - protein, 98 aa, Populus trichocarpa
MASSSVSSRGSGSWTAQQNKAFERALAVYDRDTPDRWHNVARAVGGKTAEEVKRHYEILVEDVKHIESGRVPFPNYRTTGANGHSKTGEEKMYIYSSL

SEQ ID NO: 189 - DNA, 279 bp, Populus trichocarpa
atgtcttcaagctatcaagcttccagaaattctagatccgcttggacaccaagggaaaacaaactgtttgaaaaggcactagccttgtttgataaggacacaccggacaggtggcaaaatatagccaaagctgttggtggtgtgaaatctgccgaggaagtgaagaaacactatgaaatccttattgaagatcttcaacatatcgagtctggccgcattcctattcctaagtacaagtctagtggaagctgcaacaacacaaacgaagaggaaaggtaa

SEQ ID NO: 190 - protein, 92 aa, Populus trichocarpa
MSSSYQASRNSRSAWTPRENKLFEKALALFDKDTPDRWQNIAKAVGGVKSAEEVKKHYEILIEDLQHIESGRIPIPKYKSSGSCNNTNEEER

SEQ ID NO: 191 - DNA, 255 bp, Populus trichocarpa
atggcttatttcacgtcttcacatggttctagctcctcttggacgcccaaacaaaacaagctgtttgagaaggcactggctgtctatgacaaagacaccccagaccgctggcaaaatgtggccaaggctgtgggtggcaagtcggcagaagaagttaagatgcactacgatcgtcttgtggaggatcttacatatatagaatccggccaagctccactgccaaactacaagccctctgggagcaatagtacgtag

SEQ ID NO: 192 - protein, 84 aa, Populus trichocarpa
MAYFTSSHGSSSSWTPKQNKLFEKALAVYDKDTPDRWQNVAKAVGGKSAEEVKMHYDRLVEDLTYIESGQAPLPNYKPSGSNST

SEQ ID NO: 193 - DNA, 300 bp, Populus trichocarpa
atgtcttatttcacatcttcaaatggcaccggctcctcttggacagccaaacaaaataagctattcgagaaggccctggctgtatacgacaaagacaccccagaccgctggcaaaatgtggccaaggccgtgggtggcaagtctcctgaagaagttaagaggcactatgatcgtctcgtggaggatctcgtgtacatagaatccggccaagcccctctgccgaattacaagccctctggcagcaatggtagaggacttgttgaagagcaaaggcttacgaggaacttaaagctgcaatga

SEQ ID NO: 194 - protein, 99 aa, Populus trichocarpa
MSYFTSSNGTGSSWTAKQNKLFEKALAVYDKDTPDRWQNVAKAVGGKSPEEVKRHYDRLVEDLVYIESGQAPLPNYKPSGSNGRGLVEEQRLTRNLKLQ

SEQ ID NO: 195 - DNA, 276 bp, Sorghum bicolor
atgtcttggagcgacagtgagaacgcggtgttcgagcgcgcgctggccacgtacgaccgggacacgcccaggcggtgggagctcgtggccgccgcggtgggcggcgggaagaccgccgaggacgcgaggcgccactacgcccacctcgtcaatgacgtcggcgacatcgagtccggcggctacggcaacgaccccaaccccaaccccaacgccgccgcccgcaacggcaacaacgggaacaacaacaggggcagagccaacaggccccagagatga

SEQ ID NO: 196 - protein, 91 aa, Sorghum bicolor
MSWSDSENAVFERALATYDRDTPRRWELVAAAVGGGKTAEDARRHYAHLVNDVGDIESGGYGNDPNPNPNAAARNGNNGNNNRGRANRPQR

SEQ ID NO: 197 - DNA, 300 bp, Sorghum bicolor
atgtcgtccaactcgtcggcgtcgtcgtctgagtggacgaagccgcagcacaagctgttcgagcgcgccctggcggtgtacgacgcggacaccccggaccggtggcacaacgtggcgcgctacatgggcggcggcacgtccgtcgaggaggtgcgccgccactaccagcagctcgtcgtcgacgtcgcgcggatcgagtccgacggagtgcccttccactggttgaaatatctgaatgaagcttcaatgaagggaagggttaaacagtggctagctgtgctctttgaagaagatctataa

SEQ ID NO: 198 - protein, 99 aa, Sorghum bicolor
MSSNSSASSSEWTKPQHKLFERALAVYDADTPDRWHNVARYMGGGTSVEEVRRHYQQLVVDVARIESDGVPFHWLKYLNEASMKGRVKQWLAVLFEEDL

SEQ ID NO: 199 - DNA, 297 bp, Sorghum bicolor
atggcaacgatgtcgctgagctcgacgagggcgcagtggacggcgaagcagaacaagctgttcgagcaggcgctggcggtgtacgacagggacacgccggaccggtggcacaacatcgcgcgcgccgtcgggggcggcaagtcggcggacgaggtcaggcgctactacgagctgctggtgaaggacgtggagcacatcgaggccggcaaggtgcccttcccggcctacaggtgccccgccggctacgacgccgacagaatcgatcgatctcctgcgctgaagcacctgaagatctag

SEQ ID NO: 200 - protein, 98 aa, Sorghum bicolor
MATMSLSSTRAQWTAKQNKLFEQALAVYDRDTPDRWHNIARAVGGGKSADEVRRYYELLVKDVEHIEAGKVPFPAYRCPAGYDADRIDRSPALKHLKI

SEQ ID NO: 201 - DNA, 264 bp, Sorghum bicolor
atgtctgggtccaggaactcttcccgcaacgttaacattgattccaactggagcaaaaaggagaacaagctgttcgaggaggccctagcctgctatggtgagggcacacctgaccgctggcacaaggtggcccgtgccatgggtggcatcaagacagccgatgaagttcgccgccattatgagatccttaatgatgatgtcacgctcattgaatccggcggagttccattccccaactacaacacacagggagcttggaactaa

SEQ ID NO: 202 - protein, 87 aa, Sorghum bicolor
MSGSRNSSRNVNIDSNWSKKENKLFEEALACYGEGTPDRWHKVARAMGGIKTADEVRRHYEILNDDVTLIESGGVPFPNYNTQGAWN

SEQ ID NO: 203 - DNA, 294 bp, Sorghum bicolor
atgagttcatcctggaccgatagtcaaaacaagcttttcgagagggcgctggcagtatatgacaaggacacaccagaccgctggcacaatattgcacgagcagttggctgtggaaagacagctgaggatgtgaagaggcactacagatggctgaagagggatgtgcagcaaattgaatctggagaaggcggtcaaggatcccactccagcaactccagtggtagtggaagcagcagcaattcttgtggcaggaacaatgatgacaagaggatgaggcaccccaaaccgcagtga

SEQ ID NO: 204 - protein, 97 aa, Sorghum bicolor
MSSSWTDSQNKLFERALAVYDKDTPDRWHNIARAVGCGKTAEDVKRHYRWLKRDVQQIESGEGGQGSHSSNSSGSGSSSNSCGRNNDDKRMRHPKPQ

SEQ ID NO: 205 - DNA, 330 bp, Sorghum bicolor
atgtctgcctcgcggagctcctctcccaactccatgtcaaagtggagccccaaagagaacaagatgtttgaacaggcactcgcctactatggcgagggcacacccaaccggtgggacaaggtgtccagcgccatgggaggcatcaagtctgctgaggaggtgcgctgccactatgaagatcttgactatgacgtcaagatgattgagtcaggccatgtaccgtacccccagtacaagacacagggattctggacccgaggctcactaatgcccactaattatgtgggctccaatcctagtattatgacaaaaatctcctacttccaatag

SEQ ID NO: 206 - protein, 109 aa, Sorghum bicolor
MSASRSSSPNSMSKWSPKENKMFEQALAYYGEGTPNRWDKVSSAMGGIKSAEEVRCHYEDLDYDVKMIESGHVPYPQYKTQGFWTRGSLMPTNYVGSNPSIMTKISYFQ

SEQ ID NO: 207 - DNA, 267 bp, Sorghum bicolor
atggcgtcgatgcagtcgatgacgagcgcagcggcgcgcgcgcagtggacgccgaagcagaacaagctgttcgagcaggcgctggccgtttacgacaaggacacgccggaccggtggcacaacatcgcccgcgccgtcggcggcggcaagtccgccgaggacgtcaggcgctactacgacctgctggaggaggacgtcggccacatcgagtccggcaaggtgcccttcccggcctaccgctgcgccaccggctacggggccgcctga

SEQ ID NO: 208 - protein, 88 aa, Sorghum bicolor
MASMQSMTSAAARAQWTPKQNKLFEQALAVYDKDTPDRWHNIARAVGGGKSAEDVRRYYDLLEEDVGHIESGKVPFPAYRCATGYGAA

SEQ ID NO: 209 - DNA, 306 bp, Saruma henryi
atggcatccagttcgatgcgcagcaccgggtctgcctggaccgccacgcagaacaaactgttcgagaaggccttggcggtgtacgacaaggacacccccgaccgttggcacaatgtcgcgagggcggtcggtgggaagtcggcggacgaagtgaagaggcactacgatatcctcatcgaggacctcaagtatatcgagtcgggaaaaatgcccttccccaactacaggtccactggaggcaacaacaaaggcagcagcctcacagatgaagagcagaggcttatcaagtacctgaagctccaatga

SEQ ID NO: 210 - protein, 101 aa, Saruma henryi
MASSSMRSTGSAWTATQNKLFEKALAVYDKDTPDRWHNVARAVGGKSADEVKRHYDILIEDLKYIESGKMPFPNYRSTGGNNKGSSLTDEEQRLIKYLKLQ

SEQ ID NO: 211 - DNA, 306 bp, Sesamum indicum
atggcgtcgagctccatgacatccgcacgtggctcagcctcagcgtggacgtctaagcaaaacaagcagttcgaggaggctttggcaatgtacgacaaggacacgcctgaccgttggcataatatagcccgagccgtgggtgggaagtcagcagaggaagtgagaaggcattatgagattctggttaaggacattatgcagatcgagacggatcaggtgccaatacctaactacagagccatggggagcaacagcagaggatacggcaatgagcacaggcttctgaagaatctgaaactgcagtga

SEQ ID NO: 212 - protein, 101 aa, Sesamum indicum
MASSSMTSARGSASAWTSKQNKQFEEALAMYDKDTPDRWHNIARAVGGKSAEEVRRHYEILVKDIMQIETDQVPIPNYRAMGSNSRGYGNEHRLLKNLKLQ

SEQ ID NO: 213 - DNA, 264 bp, Saccharum officinarum
atgtctgcctcgcggagctcctctcccaactccatgtcaaagtggagcccgaaagagaacaagatgtttgaacaggcactcgcctactatggcgagggcacacccaaccggtgggacaaggtgtccagcgccatgggaggcatcaagtctgctgaggaggtgcgctgccactatgaagatcttgactacgacgtcaagatgattgagtcaggccacgtgccgtacccccagtacaagacacagggattctggacccgaggttaa

SEQ ID NO: 214 - protein, 87 aa, Saccharum officinarum
MSASRSSSPNSMSKWSPKENKMFEQALAYYGEGTPNRWDKVSSAMGGIKSAEEVRCHYEDLDYDVKMIESGHVPYPQYKTQGFWTRG

SEQ ID NO: 215 - DNA, 264 bp, Saccharum officinarum
atgtcgtccaactcgtcgccgccgtcgtctgagtggacgaagccgcagcaaaagctgttcgagcgcgccctgtcggtgtacgacacggacaccccggaccggtggcacaacgtggcgcgctacatgggcggcggcacgtctgtggaggaggtgcgccgcgcctaccagcggctcgtcgtggacgtcacgcggatcgagtccggcggagtgcccttccactggtacgccgccgccccgccgccatcgacgctgcatcgaggttga

SEQ ID NO: 216 - protein, 87 aa, Saccharum officinarum
MSSNSSPPSSEWTKPQQKLFERALSVYDTDTPDRWHNVARYMGGGTSVEEVRRAYQRLVVDVTRIESGGVPFHWYAAAPPPSTLHRG

SEQ ID NO: 217 - DNA, 294 bp, Saccharum officinarum
atgagttcgtcctggactgacagtcaaaacaagcttttcgagagtgcgctggccatatatgacaaggacacaccagaccgctggcacaaggttgcacaagcagttggttgtggaaagaccgctgaggatgtgaagaggcactataaatggctgaagaaggatgtgcagcaaattgaatctggagaaggcagtcaaggatcccactccagcagctccggtggtagtggaagcagcagcaattcttgtggcaggaacaatggtgacaagaggatgaggcaccccaaaccgcagtga

SEQ ID NO: 218 - protein, 97 aa, Saccharum officinarum
MSSSWTDSQNKLFESALAIYDKDTPDRWHKVAQAVGCGKTAEDVKRHYKWLKKDVQQIESGEGSQGSHSSSSGGSGSSSNSCGRNNGDKRMRHPKPQ

SEQ ID NO: 219 - DNA, 261 bp, Saccharum officinarum
atgagttcgtcatcatggacggataggcagaacaagctgtttgagaaggcactagccaagtatgataaagacaagccggactactggcaaaacgtggctcgggcagtgggcaacggaaagacggtcgatgacgtgaagaggcagttcaaggagctggttcgagatgtggaccacattgaatccacaggcggtcagaattcacagtatggcggtggcagcagcagcggaagcggcattgagcagaggcgcaacctccagtga

SEQ ID NO: 220 - protein, 86 aa, Saccharum officinarum
MSSSSWTDRQNKLFEKALAKYDKDKPDYWQNVARAVGNGKTVDDVKRQFKELVRDVDHIESTGGQNSQYGGGSSSGSGIEQRRNLQ

SEQ ID NO: 221 - DNA, 267 bp, Solanum tuberosum
atggcatcaagctcacttcaatcttcatcatggacaccgcagcaaaacaagttatttgaaagggcactagctcaattcgataaggacacacctgaccggtggcagaatgtggcgcgggcggttggaggtggaaaatccgccgatgaagtaaagagacactatgaaatacttattgaggatctcaagcgcattgaatctggacgtgttcctcttcctacttacacccatgaacaacaaaggcttttgaggtatatgaacctgcactag

SEQ ID NO: 222 - protein, 88 aa, Solanum tuberosum
MASSSLQSSSWTPQQNKLFERALAQFDKDTPDRWQNVARAVGGGKSADEVKRHYEILIEDLKRIESGRVPLPTYTHEQQRLLRYMNLH

SEQ ID NO: 223 - DNA, 228 bp, Solanum tuberosum
atgacatcaaattcactcactgcttggactccaatagaaaacaagaaattcgagcaggcactcgcggtctacgacaaggacacatctgatcgctggcaaaacattgctagatacgttggtgggaaatcagttgaagaagttaaacatcactatgctatccttgtagaggatcttaagcacattgaatctggtgacgttccattcccaaaatacaagtcaggtcgttag

SEQ ID NO: 224 - protein, 75 aa, Solanum tuberosum
MTSNSLTAWTPIENKKFEQALAVYDKDTSDRWQNIARYVGGKSVEEVKHHYAILVEDLKHIESGDVPFPKYKSGR

SEQ ID NO: 225 - DNA, 282 bp, Solanum tuberosum
atgcgcacaaattcaacgtggagtcatcatcaaaacaagttatttgagaatgcattggccatttacgacatcgatacaccagatcgatggcgtaaattggccaaggcagttggtggaaaaacagaagaagaagtgaaaaatcactatgaaaaacttgttgaagatattaagcgtatcgagtctggaaatgttccattacctaattataatagtggtcgtaataataaaggctacaatttcatggatgaagaacaaaggctgaagtatttgaagctccaatga

SEQ ID NO: 226 - protein, 93 aa, Solanum tuberosum
MRTNSTWSHHQNKLFENALAIYDIDTPDRWRKLAKAVGGKTEEEVKNHYEKLVEDIKRIESGNVPLPNYNSGRNNKGYNFMDEEQRLKYLKLQ

SEQ ID NO: 227 - DNA, 243 bp, Triticum aestivum
atgtcagggagctcatcccgcggcggcgacgacgcggcgtggagcgccaaggagaacaagctgttcgaggaggcactcgcctaccacggcgagggcacgcccgaccgctggctcaaggtgtctcgcgccatgggcgggaccaagacggccgacgaggtgcgccgccactacgagatcctcgtggacgacatcaacctcatcgagtctggcagggtcccgttccccaagtacaaggacaactga

SEQ ID NO: 228 - protein, 80 aa, Triticum aestivum
MSGSSSRGGDDAAWSAKENKLFEEALAYHGEGTPDRWLKVSRAMGGTKTADEVRRHYEILVDDINLIESGRVPFPKYKDN

SEQ ID NO: 229 - DNA, 267 bp, Triticum aestivum
atgtcttccgggtcgtcgtgtcggagcacctcgccgagctcggactcggagtggagcaagaaggagaacaagatgttcgaggaagcgctggcctactacggcgtgagcgcccccaacctctgggagaaggtggccagtgccatggggggcaccaagtccgctgaggaggtgcgccgccacttccagatccttgtcgatgacgtcaacagcatcgagcatggccgcatcccattccccaagtacaagacccagggcttctggacctaa

SEQ ID NO: 230 - protein, 88 aa, Triticum aestivum
MSSGSSCRSTSPSSDSEWSKKENKMFEEALAYYGVSAPNLWEKVASAMGGTKSAEEVRRHFQILVDDVNSIEHGRIPFPKYKTQGFWT

SEQ ID NO: 231 - DNA, 243 bp, Triticum aestivum
atgtcctcaccgagctcagactcggagtggagcaagaaggagaacaagatgtttgaggaggcgcttgcctactacggcatgggcgcccccaacctctgggagaaggtagccagcgccatggggggcaccaagtccgccgaggaggtgcgccgccacttccagttccttgttgacgacgtcaagaacatcgagcacggacgcatccccttccccaagtacaagacccggggcttctggacctaa

SEQ ID NO: 232 - protein, 80 aa, Triticum aestivum
MSSPSSDSEWSKKENKMFEEALAYYGMGAPNLWEKVASAMGGTKSAEEVRRHFQFLVDDVKNIEHGRIPFPKYKTRGFWT

SEQ ID NO: 233 - DNA, 270 bp, Triticum aestivum
atgtcttctgggtcaaggagcgcatcccgcggcggcgccaacccggagtggagcaagaaggagaataagctgttcgaggaggcactcgcctactacggcgagggcacgcccgaccgctggctcaaggtgtcccgcgccatgggcgggaccaagaatgccgacgaggtgcgccgccactatgagatccttgatagcgacatcaagctgatcgactccggcaggctccctttccccaagtacaacacccagggccagggggcttggaactga

SEQ ID NO: 234 - protein, 89 aa, Triticum aestivum
MSSGSRSASRGGANPEWSKKENKLFEEALAYYGEGTPDRWLKVSRAMGGTKNADEVRRHYEILDSDIKLIDSGRLPFPKYNTQGQGAWN

SEQ ID NO: 235 - DNA, 267 bp, Triticum aestivum
atgtcttctgggtcgtcgtctcggagcaactcgccgagctcggactcggagtggagcaagaaggagaacaagatgttcgaggaggcgctggcctactacggtgtgggcgcccccaacctctgcgagaaggtggccagcgccatggggggcaccaagtccactgaggaggtgcgccgccacttccagttcctcgtcgacgacgtcaacaacatcgagcacggtcgcatccccttccctaagtacaagacccaaggattctggacctag

SEQ ID NO: 236 - protein, 88 aa, Triticum aestivum
MSSGSSSRSNSPSSDSEWSKKENKMFEEALAYYGVGAPNLCEKVASAMGGTKSTEEVRRHFQFLVDDVNNIEHGRIPFPKYKTQGFWT

SEQ ID NO: 237 - DNA, 300 bp, Triticum aestivum
atggcgtcgctgtcaatgagcgcggccgggagagctgggtggacgccgcagcagaacaagctgttcgagcaggcactggcagtgcacgaccgggacacgcccgaccgctggcacaacgtcgctcgtgccgttggtggcggcaagtcggccgacgatgtcaaacgctactacgagctgctcgtccacgacatcgcccgcatcgaggctggcaaggtggccttccccgcctaccgttccccctgcccaggccccggccacaacggctacgaggccgacaggttgaagcacttgaagatctag

SEQ ID NO: 238 - protein, 99 aa, Triticum aestivum
MASLSMSAAGRAGWTPQQNKLFEQALAVHDRDTPDRWHNVARAVGGGKSADDVKRYYELLVHDIARIEAGKVAFPAYRSPCPGPGHNGYEADRLKHLKI

SEQ ID NO: 239 - DNA, 276 bp, Tagetes erecta
atggcaacaagctcaatgacatcatcacgtaattactcgggatcctcatggacaccgaggcaaaacaagcaattcgaagacgctttagctcactacaacaaagatagtcctgacaggtggcaaaacattgcacgggctgtaggtggaaaatcggcagaggaggtgaagaggcattatgatatccttgagagggatatcatgcaaattgaatcagatcaagtgcctttacctaattatagggataacggtcgtcgattgcaaatgaacagaggctag

SEQ ID NO: 240 - protein, 91 aa, Tagetes erecta
MATSSMTSSRNYSGSSWTPRQNKQFEDALAHYNKDSPDRWQNIARAVGGKSAEEVKRHYDILERDIMQIESDQVPLPNYRDNGRRLQMNRG

SEQ ID NO: 241 - DNA, 219 bp, Trifolium pratense
atgggatcagcttggactccaaggcaaaacaaacaatttgagagagctttggctatatatgatagagaaactccagataggtggcagaatgttgctaacatggtgggaaaatcagttgaagatgttaaaagacattatgagatactcaaagaagatgttaggcgcatcgaacatggtcaagttgcatacccttacagagcaaacaatgctaataattga

SEQ ID NO: 242 - protein, 72 aa, Trifolium pratense
MGSAWTPRQNKQFERALAIYDRETPDRWQNVANMVGKSVEDVKRHYEILKEDVRRIEHGQVAYPYRANNANN

SEQ ID NO: 243 - DNA, 303 bp, Thellungiella salsuginea
atggcatcaaacacaatgtcttcttatggctctggctcatggactgttaagcagaacaaagcctttgagcgtgctctagcaacctatgaccaagacacccctgaccgttggtacaatgttgctagagctgttggtggcaaaacaccggaagaagctaagagacaatatgaccttctcgtgcgtgacatcgagagcattgagaatggacacgtaccattccctgactacaaaagtaatggaggcagcaccaaaggcaggctgcgtgatgaggaaaagaggatgagaagcatgaggttgcagtga

SEQ ID NO: 244 - protein, 100 aa, Thellungiella salsuginea
MASNTMSSYGSGSWTVKQNKAFERALATYDQDTPDRWYNVARAVGGKTPEEAKRQYDLLVRDIESIENGHVPFPDYKSNGGSTKGRLRDEEKRMRSMRLQ

SEQ ID NO: 245 - DNA, 228 bp, Vitis vinifera
atggcatcaacctctctcaagagctttgggtcatgggccccaaagcaaaacaaactgtttgaaaaggctctagccttatatgacagggacccccccggccgctggcagaatgtgcccaacgctgtgggtggcaaatctgctgaggaggtgaaacaaccctatgagatccttattcgggacctcaagcatatcgagtcgggccgtgttcctattcccaacttcaagtag

SEQ ID NO: 246 - protein, 75 aa, Vitis vinifera
MASTSLKSFGSWAPKQNKLFEKALALYDRDPPGRWQNVPNAVGGKSAEEVKQPYEILIRDLKHIESGRVPIPNFK

SEQ ID NO: 247 - DNA, 228 bp, Vitis vinifera
atggtagcaccctctctaaagatctctggatcatggacccctaagcaaaacaaactgtttgaaaaggctctagccttatatgacagggacacccccgaccgctggcagaatgtggccaacgctgtgggtggcaaatctgctgaggaggtgaaacaacactatgagatccttattcgggacctcaagcatatcgagtcgggccgtgttcctattcccaactacaagtag

SEQ ID NO: 248 - protein, 75 aa, Vitis vinifera
MVAPSLKISGSWTPKQNKLFEKALALYDRDTPDRWQNVANAVGGKSAEEVKQHYEILIRDLKHIESGRVPIPNYK

SEQ ID NO: 249 - DNA, 276 bp, Vitis vinifera
atgggattgagttcaaataactggactaccaagcaaaacaaactgttcgagaatgctttggtgatgtatgacaaggacaccccggaccgctggcagaacatggccagggctgtgggtgggaagactgtggaggaggtgaagaggcactatgagatgcttgtggaggatgtcaagcatattgagtttggccaagtcccattgcctaactacagaaaagctggagcctccaacaaaggatacaacttcaacgatgaagaacagagggcttccttttga

SEQ ID NO: 250 - protein, 91 aa, Vitis vinifera
MGLSSNNWTTKQNKLFENALVMYDKDTPDRWQNMARAVGGKTVEEVKRHYEMLVEDVKHIEFGQVPLPNYRKAGASNKGYNFNDEEQRASF

SEQ ID NO: 251 - DNA, 306 bp, Vitis vinifera
atggcatccagctcaatgtcctcccgcagctctggctcatcctggactgccaagcaaaacaaagcctttgaagaggcgcttgcagtgtatgacaaggacacccctgaccggtggtacaatgttgccagggctgttggtgggaaaaccgtggaggaagtgaagaggcactatgagatccttgttgaggatatcaagagcatcgactcagacaaagtgcccttccccaattacaagactaccggagctagtggccggtccaacatgagcgaccaggaaaagaggatgatgaatctgaagctccgctga

SEQ ID NO: 252 - protein, 101 aa, Vitis vinifera
MASSSMSSRSSGSSWTAKQNKAFEEALAVYDKDTPDRWYNVARAVGGKTVEEVKRHYEILVEDIKSIDSDKVPFPNYKTTGASGRSNMSDQEKRMMNLKLR

SEQ ID NO: 253 - DNA, 309 bp, Vitis vinifera
atggcatcccatgctttctcctcttcatgttattcaagctcctcttggacacagaagcaaaacaaactatttgaagaagccctggctctgtacgacaagaacactcctgaccgctgggcaaatatagccaaggctgtgggtgggaaatctgctgaggaagtaaagagacactatgagatcctggaacaggatgtcatgcatatagaaaacggccaagtccctctacccatttacaggtcaactgggagtagcagcggaggaagtgttgatgaacaaaggcacttgctgaagaatctaaagctccgttga

SEQ ID NO: 254 - protein, 102 aa, Vitis vinifera
MASHAFSSSCYSSSSWTQKQNKLFEEALALYDKNTPDRWANIAKAVGGKSAEEVKRHYEILEQDVMHIENGQVPLPIYRSTGSSSGGSVDEQRHLLKNLKLR

SEQ ID NO: 255 - DNA, 297 bp, Vitis vinifera
atggatgattttccaaatgttttgtgtgaatggagttgggaggagaacaagtcgtttgagctagctctggcagtggtggatgaacgagacccagatcggtggaaggtcgtggcagccatggtgggagggaagagtgcggaggaggttgagaaacattatgttattctcttgcaggatttgcagttcatcgagtctggtgaaatggatcataaactgggtgaggctcagccctgcgttcaactcgagtgttggaccgaccaagatcacaagttgctggttcaattggacataaagtga

SEQ ID NO: 256 - protein, 98 aa, Vitis vinifera
MDDFPNVLCEWSWEENKSFELALAVVDERDPDRWKVVAAMVGGKSAEEVEKHYVILLQDLQFIESGEMDHKLGEAQPCVQLECWTDQDHKLLVQLDIK

SEQ ID NO: 257 - DNA, 291 bp, Vitis vinifera
atggcatcagggtctcgcatgggctctggcttatggacttcaaagcaaaacaaactgtttgaaaaggctctagccttgtatgacaaggacaccccagaccgttggcagaatgtagccaaggctgtgggtgggaagtctgccgaggaagtgaagagacactatgagatcctcattgaggacctcaaacatatcgaatcgggccatgttccgattcctaattacaagtccactggaagcaacagcattggtgatcaagaacagaggctgctgaagtgtataaagctgcaataa

SEQ ID NO: 258 - protein, 96 aa, Vitis vinifera
MASGSRMGSGLWTSKQNKLFEKALALYDKDTPDRWQNVAKAVGGKSAEEVKRHYEILIEDLKHIESGHVPIPNYKSTGSNSIGDQEQRLLKCIKLQ

SEQ ID NO: 259 - DNA, 264 bp, Zea mays
atggcgtctatgtcgctgagctcgtcgagggcgcagtggacggctaagcagaacaagctgttcgagcaggcgctggcggtgtacgacagggacacgccggaccgctggcacaacatcgcgcgcgccgtcgggctggcaagtccgcggacgacgtcaggcgctactacgagctgctggaggaggacgtcggccacatcgagtccggcaaggtgcccttccccgcctaccgctaccccgccggctacggggccgccgacaggctga

SEQ ID NO: 260 - protein, 87 aa, Zea mays
MASMSLSSSRAQWTAKQNKLFEQALAVYDRDTPDRWHNIARAVGLASPRTTSGATTSCWRRTSATSSPARCPSPPTATPPATGPPTG

SEQ ID NO: 261 - DNA, 273 bp, Zea mays
atgtcgtcttggacctactgtgagaacgcgctgttcgagcgcgcgctggccacctacgaccgggacacgcccaggcggtgggagctcgtggccgccgcggtgggcggcgggaagaccgccgaggacgccaggcggcactacgcccacctcgtgctcgacgtcggcgacatcgagtccggcggctacggcgccaacgaccaaaacgccaacggcggcgccaacggcagcaacgggaacaacaggggcggcagagccaaccggccccagacatga

SEQ ID NO: 262 - protein, 90 aa, Zea mays
MSSWTYCENALFERALATYDRDTPRRWELVAAAVGGGKTAEDARRHYAHLVLDVGDIESGGYGANDQNANGGANGSNGNNRGGRANRPQT

SEQ ID NO: 263 - DNA, 318 bp, Zea mays
atgggttcgtcctggaccgagagtcaaaacaatctcttcgagcgtgcgctggcagtatatgacaaggacacaccagaccgctggcacaacgttgcgcgggcagtcggctgcggcaagacagccgaggacgtgaagaggcactacaagtacctgaagacggacgtgaagcacatcgaaaccgaagaaggcggccgaggatcccagtccagcagccctgctggtgctggtgctggtggcagtggaagcagcagcagcagttcttggggcagggacaacggtgacaagaggatgacgaggcaccccaaccagccgcagtga

SEQ ID NO: 264 - protein, 105 aa, Zea mays
MGSSWTESQNNLFERALAVYDKDTPDRWHNVARAVGCGKTAEDVKRHYKYLKTDVKHIETEEGGRGSQSSSPAGAGAGGSGSSSSSSWGRDNGDKRMTRHPNQPQ

SEQ ID NO: 265 - DNA, 264 bp, Zea mays
atgtctgagtccaggagctctttccgcaacgttaacactgattgcaactggagcaaaaaggagaacaagctgttcgaggaggccctagcccgctatcgcgagggcacacctgaccgctggctcaaggtgtcccgtgccatgggtggcatcaagacagccgatgaagtccgccgtcattatgagatccttaatgaggatgtcacactcattgtatctggcggaattccattccccaactacaacacacagggagcttggaactga

SEQ ID NO: 266 - protein, 87 aa, Zea mays
MSESRSSFRNVNTDCNWSKKENKLFEEALARYREGTPDRWLKVSRAMGGIKTADEVRRHYEILNEDVTLIVSGGIPFPNYNTQGAWN

SEQ ID NO: 267 - DNA, 267 bp, Zea mays
atgtctgggtccaggagctcttcgtctcacaacgttaccattgattccgagtggagcaaaaaggagaacaagctgttcgaggaggccctagcctgctacggcgcgggcacacccgaccgctggcacaaggtggcccgtgccatgggtggcatcaagacagccgacgaggttcgccgccatcacgagatccttaatgaggatgtcacgctcatcgaatccggcagagttccattccccaactacaacacgcagggagcttggaactaa

SEQ ID NO: 268 - protein, 88 aa, Zea mays
MSGSRSSSSHNVTIDSEWSKKENKLFEEALACYGAGTPDRWHKVARAMGGIKTADEVRRHHEILNEDVTLIESGRVPFPNYNTQGAWN

SEQ ID NO: 269 - DNA, 282 bp, Zea mays
tattgctagtagtaattctaattcacatgcgtgcttgaacagataatccgtccgacccactcgcttggcttgcttcttttgtagccacacgtgcttcttttttttggcgcgaagtgtacgtatgtaggacgtacttgttcagtggttctcatgatgcttgcctgccgcctagatcttcaggtcaggtgcttcagcctgtcgctgtcggcgtcgtcgtagccgccggggcacctgtacgcggggaaggccaccttgccggcctcgatgtgctccaagtccttc

SEQ ID NO: 270 - protein, 93 aa, Zea mays
MASMSLSSSRAQWTAKQNKLFEQALAVYDRDTPDRWHNIARAVGGKSADEVRRYYELLVKDLEHIEAGKVAFPAYRCPGGYDDADSDRLKHLT

SEQ ID NO: 271 - DNA, 291 bp, Zea mays
atggcgtcgctctcgatgacgacgagcgcagcggcccgcgcgcagtggacgcctaggcagaacaagctgttcgagcaggcgctggcggtgtacgacaaggacacgcccgaccgctggcacaacatcgcctgcgccgtcggcggcgggaagtccgcggacgacgtcaggcgctactacgagctgctggaggaggacgtcggccacatcgagtccggcaaggtgcccttccccgcctaccgctaccccgccggctacggggccgccgacaggctgaaacagctgaagatctag

SEQ ID NO: 272 - protein, 96 aa, Zea mays
MASLSMTTSAAARAQWTPRQNKLFEQALAVYDKDTPDRWHNIACAVGGGKSADDVRRYYELLEEDVGHIESGKVPFPAYRYPAGYGAADRLKQLKI

SEQ ID NO: 273 - DNA, 264 bp, Zea mays
ccaatgaatacatgtggttatcaatcttatgtacactaggatcctacaaccacaggtagacagacataaacttgatcataaactatactatacacatattgacatatacacactggttcatcattttattctccaaccagagctggatttcctttggttccttcttggatccgtagagctttgttttctgcctctttgagcctccaacattttttaacctcgggtccagaatccctgtgtcttgtacttggggtacggcacatt

SEQ ID NO: 274 - protein, 87 aa, Zea mays
MSASWSSSPNSMSQWSQKENKMFEEALAYYGEGTPNRWDKVSSAMGGIKSAEEVRCHYENLDYDVKMIESGNVPYPKYKTQGFWTRG

SEQ ID NO: 275 - DNA, 258 bp, Zea mays
atgtccgcctcacgcagctcctctcccaactccatctcacagtggagccagaaagagaacaagatgtttgaagaggcactcgcatactacggcgagggcacacccaaccggtgggacaaggtgtccagagccatgggaggcatcaagtctgctgaggaggtgcgctgccactatgaagatcttgactacgacgtcaagatgattgaatcaggccacgtgccgtaccccaagtacaagacacatggattctggacctga

SEQ ID NO: 276 - protein, 85 aa, Zea mays
MSASRSSSPNSISQWSQKENKMFEEALAYYGEGTPNRWDKVSRAMGGIKSAEEVRCHYEDLDYDVKMIESGHVPYPKYKTHGFWT

SEQ ID NO: 277 - DNA, 342 bp, Zea mays
tgggtacacacatgagggtaaagagacgataattcttcttccttattttcggcatatcggtcgttgcaaaggggaaacgactgtcatatatgcatgcacgtacgcatgcatgcgtatatatatcacccccggcccatggacgtaccgtacgtatcatcggagagtagccattcgtcttcatcgctggaacttcggatactgcttggctctcgtggcggcggccatgtcgtcgtcgaggccggcgccggcgacgggcgccggcgcgctgccgtggtagctgttgtagctgctgtagcgggggaaggggacgcggccggcctcgatctgggtgacgtcgtggac

SEQ ID NO: 278 - protein, 113 aa, Zea mays
MASGGGSSSSRAWTQRQNKQFECALAVYDREAPDRWHNIARYMGGTKSADEVRRHFEHLVHDVTQIEAGRVPFPRYSSYNSYHGSAPAPVAGAGLDDDMAAATRAKQYPKFQR

SEQ ID NO: 279 - DNA, 240 bp, Zingiber officinale
atggcgtcgagttcgatgagcgcgtcgtggaccgcgaaggagaacaagatgttcgagaaggcgttggcagtgttcgaccgcgacacgccggaccggtggcacaagatcgctcacgccatgggtggcaagacggcggaggaagtgaagcgccattatgatctgcttgttgaggacgtccgtcgcatcgaagccggccaaatgccttatgccaattacaggtcctccaaccgcagaggttga

SEQ ID NO: 280 - protein, 79 aa, Zingiber officinale
MASSSMSASWTAKENKMFEKALAVFDRDTPDRWHKIAHAMGGKTAEEVKRHYDLLVEDVRRIEAGQMPYANYRSSNRRG

SEQ ID NO: 281 - DNA, 243 bp, Zingiber officinale
atggcgtcagggtcgctatcccgcagctcctctggctcctcctcatggacggagcagcagaataagctcttcgagcgcgcactggcagtctacgacaaggacactcccaaccggtggcacaacgtggcccgcgccgtcggcggcggtaagaccgccgaggaggtcaaatcccactacgacctgctcatcgaggatctcaaccccaaaaaatccggccgagtcccctacccaaactacaaatag

SEQ ID NO: 282 - protein, 80 aa, Zingiber officinale
MASGSLSRSSSGSSSWTEQQNKLFERALAVYDKDTPNRWHNVARAVGGGKTAEEVKSHYDLLIEDLNPKKSGRVPYPNYK

SEQ ID NO: 283 - protein, 30 aa, Artificial sequence
  motif 1
  VARIANT (2)..(2): / replace = "Ser"
  VARIANT (3)..(3): / replace = "Ala"
  VARIANT (5)..(5): / replace = "Glu"
  VARIANT (8)..(8): / replace = "Ala"
  VARIANT (11)..(11): / replace = "Lys"
  VARIANT (18)..(18): / replace = "Arg"
  VARIANT (19)..(19): / replace = "Glu"
  VARIANT (25)..(25): / replace = "Ser" / replace = "Gln"
  VARIANT (27)..(27): / replace = "Ile"
  VARIANT (29)..(29): / replace = "Lys"
WTPKQNKLFERALAVYDKDTPDRWHNVARA

SEQ ID NO: 284 - protein, 15 aa, Artificial sequence
  motif 2
  VARIANT (4)..(4): / replace = "Thr"
  VARIANT (5)..(5): / replace = "Val"
  VARIANT (6)..(6): / replace = "Asp"
  VARIANT (9)..(9): / replace = "Arg"
  VARIANT (14)..(14): / replace = "Leu"
GGKSAEEVKRHYEIL

SEQ ID NO: 285 - protein, 15 aa, Artificial sequence
  motif 3
  VARIANT (2)..(2): / replace = "Leu"
  VARIANT (3)..(3): / replace = "Phe"
  VARIANT (4)..(4): / replace = "Phe"
  VARIANT (6)..(6): / replace = "Asp"
  VARIANT (7)..(7): / replace = "Asn"
  VARIANT (9)..(9): / replace = "Met"
  VARIANT (14)..(14): / replace = "Lys"
DVKHIESGRVPFPNY

SEQ ID NO: 286 - protein, 32 aa, Artificial sequence
  motif 4
  VARIANT (2)..(2): / replace = "Ser"
  VARIANT (3)..(3): / replace = "Val" / replace = "Thr"
  VARIANT (4)..(4): / replace = "Gln"
  VARIANT (5)..(5): / replace = "Gln" / replace = "Asp"
  VARIANT (6)..(6): / replace = "Ser"
  VARIANT (8)..(8): / replace = "Ala"
  misc_feature (11)..(11): Xaa can be any naturally occurring amino acid
  VARIANT (12)..(12): / replace = "Val"
  VARIANT (15)..(15): / replace = "Val" / replace = "Thr"
  VARIANT (16)..(16): / replace = "Tyr"
  VARIANT (18)..(18): / replace = "Arg" / replace = "Gln"
  VARIANT (19)..(19): / replace = "Glu"
  VARIANT (20)..(20): / replace = "Ser"
  VARIANT (21)..(21): / replace = "Ala" / replace = "Arg" / replace = "Cys"
  VARIANT (22)..(22): / replace = "Asp" / replace = "Asn"
  misc_feature (25)..(25): Xaa can be any naturally occurring amino acid
  VARIANT (26)..(26): / replace = "Asp"
  VARIANT (29)..(29): / replace = "Lys" / replace = "Gln" / replace = "His"
  VARIANT (30)..(30): / replace = "Val"
  VARIANT (31)..(31): / replace = "Ile"
  VARIANT (32)..(32): / replace = "Glu" / replace = "Ala"
WTAKENKDFEXALAEFDKDTPERWXNVARAVG

SEQ ID NO: 287 - protein, 13 aa, Artificial sequence
  motif 5
  VARIANT (2)..(2): / replace = "Pro" / replace = "Ala" / replace = "Thr"
  VARIANT (3)..(3): / replace = "Asp"
  VARIANT (4)..(4): / replace = "Asp"
  VARIANT (5)..(5): / replace = "Ala"
  misc_feature (7)..(7): Xaa can be any naturally occurring amino acid
  VARIANT (8)..(8): / replace = "Gln"
  VARIANT (10)..(10): / replace = "Asp"
  VARIANT (11)..(11): / replace = "Ile" / replace = "Leu" / replace = "His"
  VARIANT (13)..(13): / replace = "Val"
TVEEVKXHYEVLL

SEQ ID NO: 288 - protein, 9 aa, Artificial sequence
  motif 6
  VARIANT (2)..(2): / replace = "Asp"
  VARIANT (3)..(3): / replace = "Asn"
  VARIANT (4)..(4): / replace = "Asp"
  misc_feature (5)..(5): Xaa can be any naturally occurring amino acid
  VARIANT (7)..(7): / replace = "Ala"
  VARIANT (8)..(8): / replace = "Phe" / replace = "Tyr"
IESGXVPLP

SEQ ID NO: 289 - DNA, 2194 bp, Oryza sativa
aatccgaaaagtttctgcaccgttttcaccccctaactaacaatatagggaacgtgtgctaaatataaaatgagaccttatatatgtagcgctgataactagaactatgcaagaaaaactcatccacctactttagtggcaatcgggctaaataaaaaagagtcgctacactagtttcgttttccttagtaattaagtgggaaaatgaaatcattattgcttagaatatacgttcacatctctgtcatgaagttaaattattcgaggtagccataattgtcatcaaactcttcttgaataaaaaaatctttctagctgaactcaatgggtaaagagagagattttttttaaaaaaatagaatgaagatattctgaacgtattggcaaagatttaaacatataattatataattttatagtttgtgcattcgtcatatcgcacatcattaaggacatgtcttactccatcccaatttttatttagtaattaaagacaattgacttatttttattatttatcttttttcgattagatgcaaggtacttacgcacacactttgtgctcatgtgcatgtgtgagtgcacctcctcaatacacgttcaactagcaacacatctctaatatcactcgcctatttaatacatttaggtagcaatatctgaattcaagcactccaccatcaccagaccacttttaataatatctaaaatacaaaaaataattttacagaatagcatgaaaagtatgaaacgaactatttaggtttttcacatacaaaaaaaaaaagaattttgctcgtgcgcgagcgccaatctcccatattgggcacacaggcaacaacagagtggctgcccacagaacaacccacaaaaaacgatgatctaacggaggacagcaagtccgcaacaaccttttaacagcaggctttgcggccaggagagaggaggagaggcaaagaaaaccaagcatcctccttctcccatctataaattcctccccccttttcccctctctatataggaggcatccaagccaagaagagggagagcaccaaggacacgcgactagcagaagccgagcgaccgccttctcgatccatatcttccggtcgagttcttggtcgatctcttccctcctccacctcctcctcacagggtatgtgcctcccttcggttgttcttggatttattgttctaggttgtgtagtacgggcgttgatgttaggaaaggggatctgtatctgtgatgattcctgttcttggatttgggatagaggggttcttgatgttgcatgttatcggttcggtttgattagtagtatggttttcaatcgtctggagagctctatggaaatgaaatggtttagggatcggaatcttgcgattttgtgagtaccttttgtttgaggtaaaatcagagcaccggtgattttgcttggtgtaataaagtacggttgtttggtcctcgattctggtagtgatgcttctcgatttgacgaagctatcctttgtttattccctattgaacaaaaataatccaactttgaagacggtcccgttgatgagattgaatgattgattcttaagcctgtccaaaatttcgcagctggcttgtttagatacagtagtccccatcacgaaattcatggaaacagttataatcctcaggaacaggggattccctgttcttccgatttgctttagtcccagaattttttttcccaaatatcttaaaaagtcactttctggttcagttcaatgaattgattgctacaaataatgcttttatagcgttatcctagctgtagttcagttaataggtaatacccctatagtttagtcaggagaagaacttatccgatttctgatctccatttttaattatatgaaatgaactgtagcataagcagtattcatttggattattttttttattagctctcaccccttcattattctgagctgaaagtctggcatgaactgtcctcaattttgttttcaaattcacatcgattatctatgcattatcctcttgtatctacctgtagaagtttctttttggttattccttgactgcttgattacagaaagaaatttatgaagctgtaatcgggatagttatactgcttgttcttatgattcatttcctttgtgcagttcttggtgtagcttgccactttcaccagcaaagttc

SEQ ID NO: 290 - DNA, 55 bp, Artificial sequence
  primer: prm10562
ggggacaagtttgtacaaaaaagcaggcttaaacaatgagctcgatgtcgtctca

SEQ ID NO: 291 - DNA, 51 bp, Artificial sequence
  primer: prm10563
ggggaccactttgtacaagaaagctgggtaagtgttaggttttgctccttt

SEQ ID NO: 292 - DNA, 1338 bp, Oryza sativa
atgaaccagttcgtccctgattggaacaccaccagcatgggcgacggctttgcgccattaggcgaagacgacgggctcgtcgagctgctatggtgcaatggccacgtcgtcatgcagagccaggcgccgcggaagccgccgaggccggagaagacgacggcggcggcggcggcggcgatggcggaggatgagtcggcgtcgtggtttcagtacccggtcgacgacgtgcttgagaaggacctgttcaccgagctgttcggcgaaatgacggcggccggcggcggcggcggcgacgtccgcagggcggcgtgcaaggaggagcgcggcgcggtcgccgcgttccagagcaggatgatgccgccgccgtggccggcgagggggaaggcggagttcggtgacgtcgacgacgtgtgcggcgtctcggaggtcgtcatggcgaagatggacggggcggcggcggcggagacggtcggcgagtcatcgatgctgacaatcgggtcgagcatctgcgggagcaaccacgtccagacgccgccggtggggaacgggaaggccggcgccggcaccgccggcgccgccagaagggcgcacgacacggcgacggtggcgtcgtcgtcgatgaggtcgaggtcctgcaccgccaaggccgagccgcgcgacgtcgcagccgccggcgtcggcggcaagcggaagcagcgcggcggcgccgccatggagtccgggagccccagcgaggacgtggagttcgagtccgccgccgcaacgtgctcgccggcgcagaagacgacgacggcgaagcggcggcgcgccgccgaggtgcacaacctctccgagaggaggagaagagataggatcaatgagaagatgaaagcattacaggagctcatacctcactgcaacaaaacggacaaagcatcgatgctggatgaagcgatcgagtatctcaagtcactgcagctccagctacagatgatgtggatgggcggcggaatggcgccgccggcggtgatgttcccggcggccggcgtgcaccagtacatgcagcggatgggcgccgtcgggatgggcccaccacacatggcgtccctgccgaggatgccgccgttcatggcgccgccgcccgccgccgtgcagagctcgccggtggtcagcatggccgacccctacgcccgctgcctcgccgtcgaccacctccagccaccgcctccgatgcattacctgcaggggatgagcttctaccagctcgccgcggccaagaaccttcagcagcagcagaacacggcggaggcgccgccaccgccaccggccggaggcaaccgcgcagccgctgactcctga

SEQ ID NO: 293 - protein, 445 aa, Oryza sativa
MNQFVPDWNTTSMGDGFAPLGEDDGLVELLWCNGHVVMQSQAPRKPPRPEKTTAAAAAAMAEDESASWFQYPVDDVLEKDLFTELFGEMTAAGGGGGDVRRAACKEERGAVAAFQSRMMPPPWPARGKAEFGDVDDVCGVSEVVMAKMDGAAAAETVGESSMLTIGSSICGSNHVQTPPVGNGKAGAGTAGAARRAHDTATVASSSMRSRSCTAKAEPRDVAAAGVGGKRKQRGGAAMESGSPSEDVEFESAAATCSPAQKTTTAKRRRAAEVHNLSERRRRDRINEKMKALQELIPHCNKTDKASMLDEAIEYLKSLQLQLQMMWMGGGMAPPAVMFPAAGVHQYMQRMGAVGMGPPHMASLPRMPPFMAPPPAAVQSSPVVSMADPYARCLAVDHLQPPPPMHYLQGMSFYQLAAAKNLQQQQNTAEAPPPPPAGGNRAAADS

SEQ ID NO: 294 - DNA, 1437 bp, Arabidopsis thaliana
atgcatcattttgtccctgacttcgataccgatgatgattatgtcaacaaccataattcttctttgaatcatcttcctagaaaatccattactactatgggtgaagatgatgatcttatggagcttttatggcagaacggtcaagttgttgttcaaaaccagagacttcacaccaagaaaccttcttcttctccaccgaagcttcttccttctatggatcctcagcagcaaccttcttcagatcagaatctttttattcaagaagatgaaatgacttcttggcttcattatcctctccgtgacgatgatttctgctcagatcttctcttctccgccgcacctactgcgacggctaccgcgacggtgagtcaagtcaccgccgcgagaccgccagtatcttcgacgaatgagtcgaggccgccggtgaggaacttcatgaatttctcgaggctgagaggggattttaataacggtagaggtggtgaatctggaccgttgctttcgaaggcggttgtgagagaatctacgcaggtaagtcctagcgcaacaccgtcggcggcggcgagtgaatccggtttaacacggcggacggatggtactgacagttccgccgtagctggaggcggcgcgtataatcggaagggaaaagcagtggctatgacggcgccggcgatcgagataaccggtacatcgtcatctgtagtgtcaaagagcgaaatcgaaccggagaagacgaacgtcgatgataggaaacgaaaagagagagaagccaccactactgatgaaactgaatcccgtagcgaggaaacaaaacaagcacgtgtatcaacaacatctaccaagagatctcgtgctgctgaagttcataatctctctgaaagaaaacggagagataggatcaatgagagaatgaaagctttgcaagaacttatacctcgctgcaacaagtcagataaagcttcgatgctagatgaagctattgagtacatgaaatctcttcagcttcaaatacagatgatgtcaatgggatgtggaatgatgccaatgatgtatccgggcatgcaacagtacatgcctcatatggcgatgggtatgggtatgaaccagcctattcctcctccttccttcatgccattccccaacatgttagccgctcaaagacctttgcctacacaaactcacatggccgggtcaggaccgcaataccctgttcatgcttctgacccgtcaagagtctttgtaccgaaccagcagtatgatccaacctcgggccagcctcagtatccagctggttacacggatccatatcagcagttccgcggtctccacccgacccaaccacctcagtttcagaatcaagcaacatcgtacccaagttcgagcagggtgagtagtagtaaggaatctgaggatcacggaaaccacacaacaggttaa

SEQ ID NO: 295 - protein, 478 aa, Arabidopsis thaliana
MHHFVPDFDTDDDYVNNHNSSLNHLPRKSITTMGEDDDLMELLWQNGQVVVQNQRLHTKKPSSSPPKLLPSMDPQQQPSSDQNLFIQEDEMTSWLHYPLRDDDFCSDLLFSAAPTATATATVSQVTAARPPVSSTNESRPPVRNFMNFSRLRGDFNNGRGGESGPLLSKAVVRESTQVSPSATPSAAASESGLTRRTDGTDSSAVAGGGAYNRKGKAVAMTAPAIEITGTSSSVVSKSEIEPEKTNVDDRKRKEREATTTDETESRSEETKQARVSTTSTKRSRAAEVHNLSERKRRDRINERMKALQELIPRCNKSDKASMLDEAIEYMKSLQLQIQMMSMGCGMMPMMYPGMQQYMPHMAMGMGMNQPIPPPSFMPFPNMLAAQRPLPTQTHMAGSGPQYPVHASDPSRVFVPNQQYDPTSGQPQYPAGYTDPYQQFRGLHPTQPPQFQNQATSYPSSSRVSSSKESEDHGNHTTG

SEQ ID NO: 296 - DNA, 1293 bp, Arabidopsis thaliana
atggaacaccaaggttggagttttgaggagaattatagtttgtccactaatagaagatctatcaggccacaagatgaactagtggagttattatggcgagatggacaagtggttctgcagagccaaactcatagagaacaaacccaaacccagaaacaagatcatcatgaagaagccctaagatccagcacctttcttgaagatcaagaaactgtctcttggatccaataccctccagatgaagacccattcgaacccgacgacttctcctcccacttcttctcaaccatggatcccctccagagaccaacctcagagacggttaagcctaagtccagtcctgaacctcctcaagtcatggttaagcctaaggcctgtcctgaccctcctcctcaagtcatgcctcctccaaaatttaggttaacaaattcatcatcggggattagggaaacagaaatggaacagtactcggtaacgaccgttggacctagccattgcggaagcaacccatcacagaacgatctcgatgtctcaatgagtcatgatcgaagcaaaaacatagaagaaaagcttaatccgaacgcaagttcctcatcaggtggctcctctggttgcagctttggcaaagatatcaaagaaatggctagtggaagatgcatcacaaccgaccgtaagagaaaacgtataaatcacactgacgaatctgtatctctatcagatgcaatcggtaacaagtcgaaccaacgatcaggatcaaaccgaaggagtcgagcagctgaagttcataatctctccgaaaggaggaggagagataggatcaatgagagaatgaaggctttgcaagaactaatacctcactgcagtaaaactgataaagcttcgattttagacgaagccatagattatttgaaatcacttcagttacagcttcaagtgatgtggatggggagtggaatggcggcggcggcggcttcggctccgatgatgttccccggagttcaacctcagcagttcatacgtcagatacagagcccggtacagttacctcgatttccggttatggatcagtctgcaattcagaacaatcccggtttagtttgccaaaacccggtacaaaaccagatcatctccgaccggtttgctagatacatcggtgggttcccacacatgcaggccgcgactcagatgcagccgatggagatgttgagatttagttcaccggcgggacagcaaagtcaacaaccgtcgtctgtgccgacgaagaccaccgacggttctcgtttggaccactag

SEQ ID NO: 297 - protein, 430 aa, Arabidopsis thaliana
MEHQGWSFEENYSLSTNRRSIRPQDELVELLWRDGQVVLQSQTHREQTQTQKQDHHEEALRSSTFLEDQETVSWIQYPPDEDPFEPDDFSSHFFSTMDPLQRPTSETVKPKSSPEPPQVMVKPKACPDPPPQVMPPPKFRLTNSSSGIRETEMEQYSVTTVGPSHCGSNPSQNDLDVSMSHDRSKNIEEKLNPNASSSSGGSSGCSFGKDIKEMASGRCITTDRKRKRINHTDESVSLSDAIGNKSNQRSGSNRRSRAAEVHNLSERRRRDRINERMKALQELIPHCSKTDKASILDEAIDYLKSLQLQLQVMWMGSGMAAAAASAPMMFPGVQPQQFIRQIQSPVQLPRFPVMDQSAIQNNPGLVCQNPVQNQIISDRFARYIGGFPHMQAATQMQPMEMLRFSSPAGQQSQQPSSVPTKTTDGSRLDH

SEQ ID NO: 298 - DNA, 1329 bp, Arabidopsis thaliana
atggaacaagtgtttgctgattggaattttgaagataattttcacatgtccactaataaaagatcaatcagaccagaagatgaattagtggagctattgtggagagatggtcaagtggttttacaaagccaagctcgtagagaaccgtcagtccaagtccaaacccacaaacaagaaaccctaagaaaacccaacaatatttttcttgacaaccaagaaacagtacaaaagcctaactacgctgctctagatgatcaagaaaccgtctcctggatacaataccctccggatgacgtcatcgaccctttcgaatccgagttctcctctcatttcttctcttcgatcgatcacctcggaggtcctgagaagccacgaacgatcgaagagacagttaagcatgaggctcaagccatggctcctcctaagtttagatcctcggttataacagtcggaccgagtcattgcggcagcaaccagtcaacaaatattcatcaggccactacacttccggtttctatgagtgatagaagcaagaacgtcgaagaaagacttgacacttcgtcaggtggctcctccggttgcagctatggaaggaacaacaaagaaaccgttagtggaacaagtgtaaccattgaccgtaaaagaaaacatgttatggatgctgatcaagaatctgtgtctcaatcagatataggtttgacctcaaccgatgatcaaaccatgggtaacaaatcgagccaacggtcaggatctactcgaagaagccgtgcagctgaagttcataatctctcagaaaggaggaggagagatcggatcaatgaaagaatgaaagctcttcaagaactcatacctcactgcagcagaacagataaagcttcgatattggatgaagcaattgattacttaaaatcacttcaaatgcaactccaagtgatgtggatgggaagtggaatggcggcggcggcagcagcagcagcaagtccgatgatgtttcccggggtacaatcatctccatacattaatcagatggctatgcaaagtcagatgcaattgtctcaattcccggttatgaaccggtccgctccgcagaaccatcccggtttagtatgtcaaaacccggtacagttgcagctccaagcacagaaccaaatcttatcggagcagctcgctaggtacatgggcgggattccccagatgccgccggcgggaaatcagaccgtgcaacaacaaccagcggacatgttgggatttggatctccggcgggaccgcaaagtcaactgtcggcaccggcgaccaccgacagtcttcatatgggtaaaataggctga

SEQ ID NO: 299 - protein, 442 aa, Arabidopsis thaliana
MEQVFADWNFEDNFHMSTNKRSIRPEDELVELLWRDGQVVLQSQARREPSVQVQTHKQETLRKPNNIFLDNQETVQKPNYAALDDQETVSWIQYPPDDVIDPFESEFSSHFFSSIDHLGGPEKPRTIEETVKHEAQAMAPPKFRSSVITVGPSHCGSNQSTNIHQATTLPVSMSDRSKNVEERLDTSSGGSSGCSYGRNNKETVSGTSVTIDRKRKHVMDADQESVSQSDIGLTSTDDQTMGNKSSQRSGSTRRSRAAEVHNLSERRRRDRINERMKALQELIPHCSRTDKASILDEAIDYLKSLQMQLQVMWMGSGMAAAAAAAASPMMFPGVQSSPYINQMAMQSQMQLSQFPVMNRSAPQNHPGLVCQNPVQLQLQAQNQILSEQLARYMGGIPQMPPAGNQTVQQQPADMLGFGSPAGPQSQLSAPATTDSLHMGKIG

SEQ ID NO: 300 - DNA, 1689 bp, Glycine max
atgaacaacagtattcctggttgggattttgagagtgatacatgtctcaccaaccaaagaaagctcatagggccggaccaagaacttgtagagctcctatggaaaaatgggcaagtagttatgcacaaccaaacacataggaagacacttgggaattcatctaacttgagacaggtgcagaaaagtgatcaatcagtattaaggtctagcggtccctatggaaactcaagcaacttggatcaagaagatgccgccccatgggtccaattcccacttgaggacccattggaacaagatttttgttcaaaccttttatctgaactaccaacttgtgaatttgaatcttacaagccaatcaggcaattggaagaggaaaagtttgccaaattttttgcttccggtaccccccatcatcctacaacttcaagttcacaaccactaccacctaacatgaaaccctcatgtattcagggactccaagggaatcctattcctatgccagctccaagatttcatggtcctgattcatctcagaaaatccatgactttggagcatcacgaaaggttctaaattttcctcagttttcaacaccccgtaataatgttccatcagcacctggtattacacagtttagagagaaaactactgctaacatgtcacaaagtgaggctagagagtactcagtgatcacagttggttcaagtcactgtggcagcaatcacatccctcaggagcaagatgtaagcaggatttcaagcactggtgtttgggccactactaataataatactactttatctgctgagcctgaagctgtcagagattatgtccaaagaccgatttgtcctaagagtggccaaggaaaatcagagatgattgaactaactgtgacttcatcttccggtggctcgggaagtactggtatcggaagaacctgttccctatcaacaagagatcatggccaaaagagaaaagggacagaagaagaagcgttagaggaacaaagtgaggacacagaacttaaatcagctgatggaaacaaggcttctcagcggacgaggtcttccagaaggaaccgtgcagcagaagtgcataatcaatcagaaaggagaagaagagataggatcaacgagaagatgaggacattgcagcaactgatacctaatagtaacaagacagacaaagcatcaatgttagaagaggcaatcgaatacttgaaatcacttcagtttcagcttcaggttatgtggatggggggtggcatgacaccagtgatgttcccaggaattcagcactatatgtcacaaatgggtatgggaatgggtgcaccttctttgccttccattcacaacccgatgcaattgccaaaagtgccacatgatcaagccatgtctgtgcttcagataccaaaccagaatttaatgtgtcaaaatccagttttgggtgcctttaactaccaaaaccagatgcagaacccgtgccttccagaacaatatgcacgttacatgggttaccatcttatgcaaaatgcctctcagcctatgaatgtgttcagatatggttcccaagcagtgcaacacagtcaaacgatgattgcaccaggcaataatagcagcggacccatgagtggaacagctaatattgatgatgctgacagtggcaaagcgggttcttccacctttaattga

SEQ ID NO: 301 - protein, 562 aa, Glycine max
MNNSIPGWDFESDTCLTNQRKLIGPDQELVELLWKNGQVVMHNQTHRKTLGNSSNLRQVQKSDQSVLRSSGPYGNSSNLDQEDAAPWVQFPLEDPLEQDFCSNLLSELPTCEFESYKPIRQLEEEKFAKFFASGTPHHPTTSSSQPLPPNMKPSCIQGLQGNPIPMPAPRFHGPDSSQKIHDFGASRKVLNFPQFSTPRNNVPSAPGITQFREKTTANMSQSEAREYSVITVGSSHCGSNHIPQEQDVSRISSTGVWATTNNNTTLSAEPEAVRDYVQRPICPKSGQGKSEMIELTVTSSSGGSGSTGIGRTCSLSTRDHGQKRKGTEEEALEEQSEDTELKSADGNKASQRTRSSRRNRAAEVHNQSERRRRDRINEKMRTLQQLIPNSNKTDKASMLEEAIEYLKSLQFQLQVMWMGGGMTPVMFPGIQHYMSQMGMGMGAPSLPSIHNPMQLPKVPHDQAMSVLQIPNQNLMCQNPVLGAFNYQNQMQNPCLPEQYARYMGYHLMQNASQPMNVFRYGSQAVQHSQTMIAPGNNSSGPMSGTANIDDADSGKAGSSTFN

SEQ ID NO: 302 - DNA, 1446 bp, Glycine max
atggagctgctatggcacaacggccaggtcgtggtgcagagtcagaaccaacgttctctgagaaaacttccgccggtgaccaactcccacgacgcctctcccgccggtccttcaatgacgagagagattcgaccgctggtggagaatttcaatcagcatctcttcatgcacgaaggcgaaatggcttcgtggcttcactatcctatcgacgacgacgagcctgccttcatgcaaaccctcggccacacgtctcagctcacggagctccggccgatgtcggcgaatccacggcctccgattccgcccccgagaaggccggaacagaggacgccgaacttcgcgtacttctcgaggcacaacacgagagccgcggagccgagcgtgaaggccgccgcgagggaatccacggtggtggattcgtgcgatacggaggcggcggcttcgagagtttcggagacagtaaggagcgcggcggaaggaggtgccggcgttgcggcgccttcgacgagtgccggcggtggaaggagcacgatgatgtacgatttgacgatgacgtcatcgcctggcggttcgagtagctgcgacgagccggttcaggtagcggcggcggaggaggatcggaagcggaagggacgggaggcggaggaatgggagtgtcagagcgagttacaaattccctgtaccctggtatacgctaacgtgcgctgggtgagtgacgtgggtttacgtgagcactccccgcgctgctgcatttatttcggtgctgtggccttgtgctcttttggtacggtcatcactttcaccgtcgtggctgcgcacgtgcaagcaaagaagcaagtttgtggatcaacatctacaaagagatcccgtgctgccgaggtccataatctctctgagaggaggcgtcgcgatcggattaatgaaaagatgaaagctctgcaagaacttatacctcgttgcaataagtcggacaaagcttcaatgctggatgaagcaatttcgtacttgaagtcattgcagttacaagtgcagatgatgtccatgggatgtggaatggtacctgtgatgtttcctggaatccagcagtacatgccagcaatgggaatgggggttggaatgggtatgggtatggaaatgggaatgaacagacctgtaatgccgtttcccaatatgttacctggttcggctttgccagcggcaactgcagctgctgctcatttgggaccaagaatgcaagcagcaaatcagtcagataataatatggtcacgtcagctggtccacctgatccaaatcagtcacgtatcccaaacttcactgatccttatcaacaatatcttggtccccaccagatgcagttccaattaattcagaatcaggcaatgaaccaaccaaatgttagcaagccaagtaacaatgggggccctgcgaatccagaaaaccattag

SEQ ID NO: 303 - protein, 481 aa, Glycine max
MELLWHNGQVVVQSQNQRSLRKLPPVTNSHDASPAGPSMTREIRPLVENFNQHLFMHEGEMASWLHYPIDDDEPAFMQTLGHTSQLTELRPMSANPRPPIPPPRRPEQRTPNFAYFSRHNTRAAEPSVKAAARESTVVDSCDTEAAASRVSETVRSAAEGGAGVAAPSTSAGGGRSTMMYDLTMTSSPGGSSSCDEPVQVAAAEEDRKRKGREAEEWECQSELQIPCTLVYANVRWVSDVGLREHSPRCCIYFGAVALCSFGTVITFTVVAAHVQAKKQVCGSTSTKRSRAAEVHNLSERRRRDRINEKMKALQELIPRCNKSDKASMLDEAISYLKSLQLQVQMMSMGCGMVPVMFPGIQQYMPAMGMGVGMGMGMEMGMNRPVMPFPNMLPGSALPAATAAAAHLGPRMQAANQSDNNMVTSAGPPDPNQSRIPNFTDPYQQYLGPHQMQFQLIQNQAMNQPNVSKPSNNGGPANPENH

SEQ ID NO: 304 - DNA, 1545 bp, Glycine max
atgaacaacagtgttcctgattggaattttgggagtgattcctgtgtcacctccaccaatcaaaagaagcccatgatgggggtggaccaagagcttgtggagcttctgtggcaaaatggccaggtagtgcacagccaaactcatagaaaaccggttgtgaactcaagtaacttgattcaagatgatgagacagtctcatggatccaataccctcttgaggatccattggaacaagaattctgttcaaaccttttgtctgaactggcaccttgtgaagttgagtcctataagcaaatcaagccatttgaagagggaaaatttaccaaattggatgcttctagtgcccctcatgtgactgtaagttcacaattacctaccatgaaatcctcctcttttcaggatttctcaggaattcctataccggccccaagattccatgtttctgattcacctcagaaaaacaataatcacttgggtggatcatgtaaggtccaaaacttctctcacttttcagcaccccttaatgtttcttcagcatcggctaacgtgcattttggagacaaaattactggtaacatgtcaagaaatgagattagggagtgctcattgatgacagttggatcaagttactgtggtagcaatcacatcccccaagatccagatgctagcagggcatcaagcaatggtgtttggactactactttatcagtcgagccagaagctaaggagaaagggaaatcagagatgcttgaaccagctgtgacttcatcatctggtggctcaggtagtagtcttggaaaaacttgttcattatctacgagaaaccagggccaaaaaagaaaaggaatagacgtggaagaatctgaggagcaaagtgaggacacagaacttaaatcagcacttggaaacaagtcatctcaacgcacagggtcggctcgaaggaaccgtgctgctgaagtgcataatctatcggaaaggagaaggagagacaggatcaatgagaagatgaaggcattgcaacaactcatacctcacagtagcaagacagacaaagcatcgatgttggaagaggcaattgaatacttgaaatcacttcagctacaacttcagctaatgtggatgggatctggcatggcaccaataatgtttccaggaattcagcactacatgtcacaaatgggcatgggaatggctagaccgcctttccctcctcctattcataatccgatgcaattaccgagagtgccgcttgataagtctgtatctgcatctcagacaccaaaccagacattaatgtgccaaaatcccattttgggtgcatttaattaccaaaatcagatgcaaaatccagctctttcggagcaatatgtgcgttacatgggctatcatcttatgcaaaatgcctctcagccaatgaatgtattcagatatggtccccagggagtacaacatagtcaaacaatgattacacccagcagcaacagcagtggaaacatgagtggagcagcaaatattgatgaggctgtgagtggcaaaatgggttaa

SEQ ID NO: 305 - protein, 514 aa, Glycine max
MNNSVPDWNFGSDSCVTSTNQKKPMMGVDQELVELLWQNGQVVHSQTHRKPVVNSSNLIQDDETVSWIQYPLEDPLEQEFCSNLLSELAPCEVESYKQIKPFEEGKFTKLDASSAPHVTVSSQLPTMKSSSFQDFSGIPIPAPRFHVSDSPQKNNNHLGGSCKVQNFSHFSAPLNVSSASANVHFGDKITGNMSRNEIRECSLMTVGSSYCGSNHIPQDPDASRASSNGVWTTTLSVEPEAKEKGKSEMLEPAVTSSSGGSGSSLGKTCSLSTRNQGQKRKGIDVEESEEQSEDTELKSALGNKSSQRTGSARRNRAAEVHNLSERRRRDRINEKMKALQQLIPHSSKTDKASMLEEAIEYLKSLQLQLQLMWMGSGMAPIMFPGIQHYMSQMGMGMARPPFPPPIHNPMQLPRVPLDKSVSASQTPNQTLMCQNPILGAFNYQNQMQNPALSEQYVRYMGYHLMQNASQPMNVFRYGPQGVQHSQTMITPSSNSSGNMSGAANIDEAVSGKMG

SEQ ID NO: 306 - DNA, 1302 bp, Glycine max
atggacgacgacgacgaagaatacccaattcccgtctcaaagaaaccctccacgcaaaacgatgagatcatggaactgttatggcaaaacggccaggtcgtgatgcaaaaccaaaaccaacgaccgttcagaaaacaaccgccgacgacggacggcgacggccccattccggcgagggagattcgatcctccgaagcggaaaactacaatagccaacacttgttcatgcaagaagacgaaatggcgtcgtggctgcactatccaatccatgaagatcctcctcccttcgatcaccacgatttctgcgccgacatcctctacccgccgccaaacgccaccgcgagccagaatcaaagcagcgcctccgtgcagtcctccccgacggtagccacggcggagcacgtggaaaccggccgcgcgagcgtcagcgccgccgccggtaaaacccccgcgtcggatggcgggagggagacggcgacgtgcgacgtgaccgtgacgtcatcgcctggcggttcgagcgggagcgctgaaccggttcagagagaaccagtggtgaaccggaagaggaagggaagggaacaagaggaatcggagtatcagagcgaggtaactaaaaagcaagttcgtggttctacatctacgaaaagatctcatgctgcagaagtccataatctctcagagaggaggcgtcgagatagaattaatgagaagatgaaagctttgcaagaacttatacctcggtgcaacaagtctgacaaagcttcaatgctggatgaagcaattgagtacttgaagtcactgcaattacaagtgcagatgatgtccatgggatgtggcatggtacctatgatatttcctggaatccagcagtatatgccaccaatgggaatggggattgggatgggtatgggtatgggcatggaaatgggaatgggaatgaacagatcagtaatgccatttcccaatatgttagctagttcgactttgccagcagcaactgcaactgctcatttgggaccaaggtttcctatgcctcctttccatatgccccatgttgctacacctgattcatccagaatgcaaggagcaaatcacccagataataatatgcttaactcacttggtacactagatccagatcaatcatgtatcccaaacttcactgatccttatcaacagtacctcagtctccaacaggcacagttacaattaatgcagacaatgaaccaaccaaatgtcagcaagcctagtactagtagaggtcaagagaatccagaaaagcatcagtcagacaaaacatga

SEQ ID NO: 307 - protein, 433 aa, Glycine max
MDDDDEEYPIPVSKKPSTQNDEIMELLWQNGQVVMQNQNQRPFRKQPPTTDGDGPIPAREIRSSEAENYNSQHLFMQEDEMASWLHYPIHEDPPPFDHHDFCADILYPPPNATASQNQSSASVQSSPTVATAEHVETGRASVSAAAGKTPASDGGRETATCDVTVTSSPGGSSGSAEPVQREPVVNRKRKGREQEESEYQSEVTKKQVRGSTSTKRSHAAEVHNLSERRRRDRINEKMKALQELIPRCNKSDKASMLDEAIEYLKSLQLQVQMMSMGCGMVPMIFPGIQQYMPPMGMGIGMGMGMGMEMGMGMNRSVMPFPNMLASSTLPAATATAHLGPRFPMPPFHMPHVATPDSSRMQGANHPDNNMLNSLGTLDPDQSCIPNFTDPYQQYLSLQQAQLQLMQTMNQPNVSKPSTSRGQENPEKHQSDKT

SEQ ID NO: 308 - DNA, 2076 bp, Glycine max
atgcctttatatgagttataccggctggccagagagaagcttggtaaagaaactaccagcacacgtgctcctgatcaatgttcctcgccagagaatgatttttttgagctggtttgggagaacggtcagatttcgagccagggtcagtccagtagagttagaaggagcccctcttgcaagagtttgccatctcactgcttaccatctcacagtcccaaggctagggataaagatgtaggatatggtagctacacaaggttggggaaatttggggatttagactctggattaaatgaaattccaatgtcggtgccatccagtgaagtggatttctgtcaagatgaagatgtgttaccttggttggattatccatcaatagatggttctttgcaacaagagtatggttctgatttccttcccgcctcaaacagttttactctattggataaaaaaagtaatggcaatatggcgtttagggattctcagaaaacttctgaagaacaagggaatgttttcaagggttcttcagctggacaggttgagactgccagacctaaagctagtagcaccagtcagttattccccccatcattgcatcagtgtcaaacatcttttgtttcgtctagatccagagcatcagatataactgaaaataacaatacgagtaatgcaaaccaggatgcgtcttatggcaaaattactcatattctatcttcctcaagtgatttttctaacgcaaaggtgcagaagtgtgatccacctatgaatagcaatggttccagttccaccataatgaatttctcccattttgcaaggcctgctgctatggtaagagctaatcttcatagcattggcctgaagtctggtttgtcttcatcaagatcagacagtatggaaatgaagaataaaggtgctgctgcaactagcagcaatcctcctgaatcaattcttgttgattcaagtgttgaatgtttaaaggaaccgatcatacaatgccagcaggttgtggagcaatccaaggctgatgtgaactctttgctgccaaaatctgttgaacagaatgctgtgccttctaagcagtcagagcctgctggtaaagagagtgccgctaagattgatctaattcccaatcaagttcctggtgacaatggcactaaaggacagacagctgctgaaaaaagtaaggagccagcagtagcctcttcctctgtttgctctggcaatggtacagaccaaggttcagaagagccaaatcaaaatttgaagcgaaaaagaaaagacactgacgactctgagtgccatagtgaagatgttgaggaagaatcagctggtgctaaaaagacagctggtgggcgaggaggtgcaggttccaagagaagccgtgcagctgaagtgcataatctatctgaaaggaagcgaagagataggatcaatgagaagatgcgtgcattacaagaactcataccaaattgcaataaggtggataaagcttcaatgctggatgaggcaattgagtatcttaaaacacttcagctccaagttcaaattatgtcaatgggagctggtttatatatgcctccaatgatgttacctgcaggaatgcagcacatgcatgcaccacatatggctccattttcacctatgggtgttggcatgcatatgggatatggtatgggttatgggatgggaatgcctgacatgaatggtggatcttcaagattccctatgattcaggtgccccaaatgcaaggaactcatatccctgttgcacatatgtctggatctacagcttttcatgggatggccagagcaaatcctccagggtttgggcttcctggacaaggacatcccatgccaatgccgcgagctcctatgtttcctttttcaggaggacaaatgccaaatgttgacccacaagttaagcaaagcactggtggccgtgactcaactagtcagatgcctacccagtgtgaagcagcagctgttggatttgagcaatctacgttggctcataataacggtcatgcaaccaaggctaatgacaatggatctgttaatcctggacctggcagataa

SEQ ID NO: 309 - protein, 691 aa, Glycine max
MPLYELYRLAREKLGKETTSTRAPDQCSSPENDFFELVWENGQISSQGQSSRVRRSPSCKSLPSHCLPSHSPKARDKDVGYGSYTRLGKFGDLDSGLNEIPMSVPSSEVDFCQDEDVLPWLDYPSIDGSLQQEYGSDFLPASNSFTLLDKKSNGNMAFRDSQKTSEEQGNVFKGSSAGQVETARPKASSTSQLFPPSLHQCQTSFVSSRSRASDITENNNTSNANQDASYGKITHILSSSSDFSNAKVQKCDPPMNSNGSSSTIMNFSHFARPAAMVRANLHSIGLKSGLSSSRSDSMEMKNKGAAATSSNPPESILVDSSVECLKEPIIQCQQVVEQSKADVNSLLPKSVEQNAVPSKQSEPAGKESAAKIDLIPNQVPGDNGTKGQTAAEKSKEPAVASSSVCSGNGTDQGSEEPNQNLKRKRKDTDDSECHSEDVEEESAGAKKTAGGRGGAGSKRSRAAEVHNLSERKRRDRINEKMRALQELIPNCNKVDKASMLDEAIEYLKTLQLQVQIMSMGAGLYMPPMMLPAGMQHMHAPHMAPFSPMGVGMHMGYGMGYGMGMPDMNGGSSRFPMIQVPQMQGTHIPVAHMSGSTAFHGMARANPPGFGLPGQGHPMPMPRAPMFPFSGGQMPNVDPQVKQSTGGRDSTSQMPTQCEAAAVGFEQSTLAHNNGHATKANDNGSVNPGPGR

SEQ ID NO: 310 - DNA, 1437 bp, Glycine max
atggaactgttatggcaaaacggccaggtcgtgatgcaaagccagaaccaacgacccttcagaaagccgccgcagccgccggaggccaacggcggcgacggcgccatttcggcgagggagattcgatcatctgaagcagaaaactacaataatagccaacacttgttcatgcaagaagacgaaatggcggcgtggctgcactatccaatccacgaagatcctccacccttcgatcaccacgatttcggcgccgacatcttctacccgccgccaaacgccaccgcgagccagaatcgcggcagcgccgccgtgcagtcctcctttcgcacgacagagctctggcatccggctcctcgacctccgattccgccgccgaggcggccggagcatgcgccgagcaggatacacaatttcgcgcacttcacgaagcacggcaatgcgtcgtcgagctcgaaggcggccgcggcggcgcagccgacggtggtggattcttgcgaaacgccggtcgcgacggcggagcacgcggaaaccggccgcgccagagccgccgccggcaaaaccgcggtgtcggacggcgggagagagacggcgacgtgcgacgtgacggtgacgtcatcgcctggcgattcgagcgggagtgccgaaccggtcgagagagaaccgatggcggaccggaagaggaagggaagggaacatgaggaatcggagtttcagagcgaggatgttgattttgaatctcccgaagctaaaaagcaagttcatggttctacatctacaaagagatctcgtgctgcagaagtccataatctctctgagaggcgccgtcgagatagaattaatgaaaagatgaaagctttgcaagaacttatacctaggtgcaacaagtctgacaaagcttcaatgctggatgaagcaattgagtacttgaagtcactgcaattacaagtgcagatgatgtccatgggatatggcatggtacctatgatgtttcctggaatacagcagtatatgccaccaatgggaatggggattgggatggggatgggcatggaaatgggaatgggaatgaacagaccagtaatgccatttaccaatatgttagctagttcgactttgccagcagcaactgcggctgttcatttgggaccaaggtttcctatgcctcctttccatatgccccatgttgctgcacccgattcatccagaatgcaaggagcaaatcacccagataataatatgcttaactcacttggtacactagatccagatcaatcacgtatcccaaacttcactgatccttatcaacagtacctcggtctccaacaggcacagttacaattaatgcagacaatgaaccaacaaaatgtcagcaagcctagtagcagtagaggtcaagagaatccagaaaagcatcagtcaggtaaagtgccattgtag

SEQ ID NO: 311 - protein, 478 aa, Glycine max
MELLWQNGQVVMQSQNQRPFRKPPQPPEANGGDGAISAREIRSSEAENYNNSQHLFMQEDEMAAWLHYPIHEDPPPFDHHDFGADIFYPPPNATASQNRGSAAVQSSFRTTELWHPAPRPPIPPPRRPEHAPSRIHNFAHFTKHGNASSSSKAAAAAQPTVVDSCETPVATAEHAETGRARAAAGKTAVSDGGRETATCDVTVTSSPGDSSGSAEPVEREPMADRKRKGREHEESEFQSEDVDFESPEAKKQVHGSTSTKRSRAAEVHNLSERRRRDRINEKMKALQELIPRCNKSDKASMLDEAIEYLKSLQLQVQMMSMGYGMVPMMFPGIQQYMPPMGMGIGMGMGMEMGMGMNRPVMPFTNMLASSTLPAATAAVHLGPRFPMPPFHMPHVAAPDSSRMQGANHPDNNMLNSLGTLDPDQSRIPNFTDPYQQYLGLQQAQLQLMQTMNQQNVSKPSSSRGQENPEKHQSGKVPL

SEQ ID NO: 312 - DNA, 1563 bp, Glycine max
atgaacaacagtgttcctgattggaattttgggagtgattcctgtgtcaccaccaccaatcaaaagaagcccatgataggggtggaccaagagcttgtagagcttcagtggcaaaatggccaggtagtgatgcacagccaaacacacagaaaaccgtttgtgaattccatcacgccgagaccgcttcggaggaattttcaatcaacattaaggactagtgagccatttgggaactcaagtaacttgattcaagatgatgagacagtctcatggatccaataccctcttgaggatccattggaacaagagttctgttcaaaccttttatctgaactggcaccttgtgaagttgagtcctataagcaaatcaagccatttgaagaggggaagtttaccaaattggatgcctctagtaccccccatgaattctcaggaattcctatacctgctccaagattccatgtttctgattcacctcagaaaaacaataatgacttgggtggatcatgtaaggtccaaaacttctctcacttttcagcacctcttaatgtttcttcagcatcggctaacgcgcattttagggacaaaattactggtaacatgtcaaaaaatgagattagagacaatcacatcccccaagatccagatgcaagcagggcatcaagcaatggtgtctggactactactttatccgccgagcctgaagctaatgaaaaagggaaatcggagatgcttgaaccaactacaacttcatcatccggtggctcaggtagtagtcttggaaaaaattgttcgctatctacgagaaaccagggccaaaaaagaaaaggaatagatgtggaagaatctgaggagcaaagtgaggacacagaacttaaatcagcacttggaaacaagtcatctcaacgtgcagggttggctcgaaggaaccgcgctgctgaagtgcataatctatctgaaaggagaaggagagaccggatcaatgagaagatgaaggcattgcaacaactcatacctcacagtagcaagacagacaaagcatcaatgttggaagaggcaatcgaatacttgaaatcacttcagttacaacttcagctaatgtggatgggatctggcatggcaccaattatgtttccaggaattcagcactatatgtcacaaatgggtatgggaatggctacaccgcctttccctcctattcacaatccgatgcaattaccgagactgccgcttgatcagtctgtatctgcgtctcagacaccaaaccagacattaatgagccaaaatcctattttgggtgcctttaattaccacaatcagatgcaaaatccagctctttcagagcaatatgcgcgttacatgggctatcatcttatgcaaaatgcctctcagccaatgaatgtattcagatatggtccccagggggtacggcatagtcaaacaatgattacacccagcaacagcagtggaaacatgagtggagcagcaaatattgatgaggctgtgagtggcaaaatggattatatcatcattataagtttcacattgcataacttctattga

SEQ ID NO: 313 - protein, 520 aa, Glycine max
MNNSVPDWNFGSDSCVTTTNQKKPMIGVDQELVELQWQNGQVVMHSQTHRKPFVNSITPRPLRRNFQSTLRTSEPFGNSSNLIQDDETVSWIQYPLEDPLEQEFCSNLLSELAPCEVESYKQIKPFEEGKFTKLDASSTPHEFSGIPIPAPRFHVSDSPQKNNNDLGGSCKVQNFSHFSAPLNVSSASANAHFRDKITGNMSKNEIRDNHIPQDPDASRASSNGVWTTTLSAEPEANEKGKSEMLEPTTTSSSGGSGSSLGKNCSLSTRNQGQKRKGIDVEESEEQSEDTELKSALGNKSSQRAGLARRNRAAEVHNLSERRRRDRINEKMKALQQLIPHSSKTDKASMLEEAIEYLKSLQLQLQLMWMGSGMAPIMFPGIQHYMSQMGMGMATPPFPPIHNPMQLPRLPLDQSVSASQTPNQTLMSQNPILGAFNYHNQMQNPALSEQYARYMGYHLMQNASQPMNVFRYGPQGVRHSQTMITPSNSSGNMSGAANIDEAVSGKMDYIIIISFTLHNFY

SEQ ID NO: 314 - DNA, 1386 bp, Medicago truncatula
atgaacaactactgcgtttcatatttccaatctcaaatggatcaacaacgattgcctcgtcctaagaaaccaatcattgcagatgatgagatcatggagttgttatggcaaaacggccaagttgttacacagaggccaaaccaccgtcatgccaagaaaccaccgtcatgtcaagaaacaactcgcggcggaggagcttctccagtagaaaactacaatcaatatctcttcatgcaagaaaacgaaatggcttcatggcttcattacgatgattctcccttcgatcgaaccttctccactgattacctcaatacgccgccggcgacggctaataacaacagtagcatacaaactccgacgtcggtggttccttctcgtcctccaattcccccgccacggaggatggggcacgtacagcctgagacaccgaatttcgcaaaacacggtgtaatgaacactgctgtgagggaatcaacggttgtggattcgtgtgatacaccagctgtgatgccggcggcgttttcggagacggtgaaaagcttggcggatcaaacggaaggagacaccgaagtagcggtggtttcgacaacttttgatgaaccgggaggttcaagtagcagtgaagaacctgaaccggttgggaaggtagcggagcaggaccgaaagaggaagggaatagaagcggaggaatgggaatatcagagcgaggatgttgattttgaatctgcggaagccaaaaaaaatatcagtggatcatctacaaagagatctcgtgctgctgaggtccataatctctcagagcggaggcgccgtgatcggattaatgaaaagatgaaagctctgcaagaacttatacctcgatctaataagtctgacaaagcatctatgctggatgaagcaattgattacttgaagtcgctgcagttacaagtgcagatgatgtccatgggatgtggcatggtacctatgatgtttcctggaatccagcagtatatgccaacggttggaatgggaatggggatgggtatggaaatgggaataaacagaccagtaatgccatttcccaatatgttatccggttctgctttgcctgcagccgcaaatttgggaccaaggttcgcgatgcctcctttccatatgccgcatgttccaacacctggttcatccagaatgcaagcagcaaatcaggtagataataatgtgatcacctcagctggaacacatgattcaaatcagtcacgtaccccaaacttcagtgattcttatcaacaatatcttggaccccaccagatgcagtttcaattgatgcagaatcaagcaatgaaccaaccaaatgtcagcaggcctcttgagaaaccagaaacccgccagtcaggagataagtga

SEQ ID NO: 315 - protein, 461 aa, Medicago truncatula
MNNYCVSYFQSQMDQQRLPRPKKPIIADDEIMELLWQNGQVVTQRPNHRHAKKPPSCQETTRGGGASPVENYNQYLFMQENEMASWLHYDDSPFDRTFSTDYLNTPPATANNNSSIQTPTSVVPSRPPIPPPRRMGHVQPETPNFAKHGVMNTAVRESTVVDSCDTPAVMPAAFSETVKSLADQTEGDTEVAVVSTTFDEPGGSSSSEEPEPVGKVAEQDRKRKGIEAEEWEYQSEDVDFESAEAKKNISGSSTKRSRAAEVHNLSERRRRDRINEKMKALQELIPRSNKSDKASMLDEAIDYLKSLQLQVQMMSMGCGMVPMMFPGIQQYMPTVGMGMGMGMEMGINRPVMPFPNMLSGSALPAAANLGPRFAMPPFHMPHVPTPGSSRMQAANQVDNNVITSAGTHDSNQSRTPNFSDSYQQYLGPHQMQFQLMQNQAMNQPNVSRPLEKPETRQSGDK

SEQ ID NO: 316 - DNA, 1455 bp, Medicago truncatula
atgaacaactactgcgtttcatatttccaatctcaaatggatcaacaacgattgcctcgtcctaagaaaccaatcattgcagatgatgagatcatggagttgttatggcaaaacggccaagttgttacacagaggccaaaccaccgtcatgccaagaaaccaccgtcatgtcaagaaacaactcgcggcggaggagcttctccagtagaaaactacaatcaatatctcttcatgcaagaaaacgaaatggcttcatggcttcattacgatgattctcccttcgatcgaaccttctccactgattacctcaatacgccgccggcgacggctaataacaacagtagcatacaaactccgacgtcggtggttccttctcgtcctccaattcccccgccacggaggatggggcacgtacagcctgagacaccgaatttcgcaaaacacggtgtaatgaacactgctgtgagggaatcaacggttgtggattcgtgtgatacaccagctgtgatgccggcggcgttttcggagacggtgaaaagcttggcggatcaaacggaaggagacaccgaagtagcggtggtttcgacaacttttgatgaaccgggaggttcaagtagcagtgaagaacctgaaccggttgggaaggtagcggagcaggaccgaaagaggaagggaatagaagcggaggaatgggaatatcagagcgaggatgttgattttgaatctgcggaagccaaaaaaaatatcagtggatcatctacaaagagatctcgtgctgctgaggtccataatctctcagagcggaggcgccgtgatcggattaatgaaaagatgaaagctctgcaagaacttatacctcgatctaataagtctgacaaagcatctatgctggatgaagcaattgattacttgaagtcgctgcagttacaagtgcagatgatgtccatgggatgtggcatggtacctatgatgtttcctggaatccagcagtatatgccaacggttggaatgggaatggggatgggtatggaaatgggaataaacagaccagtaatgccatttcccaatatgttatccggttctgctttgcctgcagccgcaaatttgggaccaaggttcgcgatgcctcctttccatatgccgcatgttccaacacctggttcatccagaatgcaagcagcaaatcaggtagataataatgtgatcacctcagctggaacacatgattcaaatcagtcacgtaccccaaacttcagtgattcttatcaacaatatcttggaccccaccagatgcagtttcaattgatgcagaatcaagcaatgaaccaaccaaatgtcagcaggcctcttgagaaaccagaaacccgccagtcaggtaaattgccttatcttagtattttgcaggatttggttatattttctgccactcctaatacagtatgccaagttttgtag

SEQ ID NO: 317 - protein, 484 aa, Medicago truncatula
MNNYCVSYFQSQMDQQRLPRPKKPIIADDEIMELLWQNGQVVTQRPNHRHAKKPPSCQETTRGGGASPVENYNQYLFMQENEMASWLHYDDSPFDRTFSTDYLNTPPATANNNSSIQTPTSVVPSRPPIPPPRRMGHVQPETPNFAKHGVMNTAVRESTVVDSCDTPAVMPAAFSETVKSLADQTEGDTEVAVVSTTFDEPGGSSSSEEPEPVGKVAEQDRKRKGIEAEEWEYQSEDVDFESAEAKKNISGSSTKRSRAAEVHNLSERRRRDRINEKMKALQELIPRSNKSDKASMLDEAIDYLKSLQLQVQMMSMGCGMVPMMFPGIQQYMPTVGMGMGMGMEMGINRPVMPFPNMLSGSALPAAANLGPRFAMPPFHMPHVPTPGSSRMQAANQVDNNVITSAGTHDSNQSRTPNFSDSYQQYLGPHQMQFQLMQNQAMNQPNVSRPLEKPETRQSGKLPYLSILQDLVIFSATPNTVCQVL

SEQ ID NO: 318 - DNA, 1485 bp, Oryza sativa
atgaaccagttcgtccctgattggagcaacatgggtgacgcatccaggacactcggcgaagatgacaacctcattgagctgctctggtgcaacggccatgtcgtcatgcagagccagaatcaccaccggaagctgccgccgaggccgccggagaaggcggcggcggcggcggtgcaagaagacgaggccggcctgtggttcccgttcgcgctcgccgactcgctggagaaggacatcttctcggacctcttctacgaggcgcccgtcgcggcgacggcggaggcggcgcctgctggcccgggcgcgggcgccgacggcgaaggaaagacttgcaagggcgacgcggcaatggcggaggaggagcgtggcgggccgggcgcggcgtccgaggcgccgcgcgagctgatgccgccgcccaagtcgacgaacgcgtcctgctcgaggcagcagacgatgagcctggcggacggcggcgacaacgccggggacctgtcggagctcgtccgggcgaggaggtcgtccggcggcgcggctcggcggaaggcggaggccggcggcggcggcggcggcgcgtcgtcgtcgatgctgagcgcgatcgggtcgagcatctgcgggagcaaccaggtgcaggtgcagcagcgcacggcgagcgagcccgggcgccgcggcgcgccgccctcggcggtggggagcgcgaacgccatcccctgcggcgggcgcgaccacggccacggccacgaggcgaccaccgtggcgtcgtcgtcggggcggtccaactgctgcttcggcaccaccaccaccacggagccgacgagcaccagcaaccggagcagcaagcgcaagcggctcgacaccaccgaggactccgagagccccagcgaggacgcggagtcggagtcggcggcgctggcgcgcaagccgccggcgaagatgacgacggcgcggaggagccgcgccgccgaggtgcacaacctctccgagaggaggagacgggacaggatcaacgagaagatgagagccctgcaggagctcataccacactgcaacaagactgacaaggcgtcgatgctggacgaggcgatcgagtacctcaagtctctgcagctgcagctgcagatgatgtggatggggagcgggatggcgccgccggtgatgttcccgggggtgcaccagtatctgccgaggatgggcgtcgggatgggggcggcggcggcggcgatgccgaggatgccgttcatggcggcgccgcagccggtggtgcccacaccgccggtgaaccaccttgacctgggcgtcaaccacctgcagccgccgccgacccagggagtggggtattatccgttgggggccaaggccgtgcagcagcagcaaaatccaccacttcacgtgccaaatggaagcattatgcctcctcctgaaaatgcacccaacacaggatcaggtatgggatccttctacttctacttctacttctcttccgattaa

SEQ ID NO: 319 - protein, 494 aa, Oryza sativa
MNQFVPDWSNMGDASRTLGEDDNLIELLWCNGHVVMQSQNHHRKLPPRPPEKAAAAAVQEDEAGLWFPFALADSLEKDIFSDLFYEAPVAATAEAAPAGPGAGADGEGKTCKGDAAMAEEERGGPGAASEAPRELMPPPKSTNASCSRQQTMSLADGGDNAGDLSELVRARRSSGGAARRKAEAGGGGGGASSSMLSAIGSSICGSNQVQVQQRTASEPGRRGAPPSAVGSANAIPCGGRDHGHGHEATTVASSSGRSNCCFGTTTTTEPTSTSNRSSKRKRLDTTEDSESPSEDAESESAALARKPPAKMTTARRSRAAEVHNLSERRRRDRINEKMRALQELIPHCNKTDKASMLDEAIEYLKSLQLQLQMMWMGSGMAPPVMFPGVHQYLPRMGVGMGAAAAAMPRMPFMAAPQPVVPTPPVNHLDLGVNHLQPPPTQGVGYYPLGAKAVQQQQNPPLHVPNGSIMPPPENAPNTGSGMGSFYFYFYFSSD

SEQ ID NO: 320 - DNA, 1266 bp, Oryza sativa
atggatggcaatgcgagatcggcggcgaatcagacgaagcaaatcgtcacggacaacgagctggtggagctgctatggcacaacggcggcgtcgtggcgcagccgcaggcggcgcaggcgagggtcgtctcctcctccggccgcggccagagcgccagcgtgctcaccggcgacgacacggagaccgccgcgtggttcccggacaccctcgacgacgcgctggagaaggacctctacacgcagctctggcgcagcgtcaccggcgacgcgttcccggcggccgcggcggcggggccgagctctcaccacgctccgccgccggacttgccgcccccggcggcgaggccgccgatgaggagcggcatcgggtcgagctggaccggcgacatctgttcggccttctgcggcagcaaccacatcccggagacggcggcgcagcgctgccgggacgccggcgcggcattgccgccggagcggccgcgccggtcgagcacccacgacggcgccggcacgtcgtcgtcgggcggctccggcagcaacttcggcgcttccggcttgcccagcgagagcgccagtgcccacaagaggaaaggcagagaagattcagacagtcgcagtgaggatgctgaatgcgaggcaaccgaagagaccaaatcgtcgtcgcggcgatatggatcaaagaggagaactcgtgcagctgaagttcataacctgtcagagaggagaagaagggatcggatcaacgagaagatgcgcgcattgcaagaactcatacctcattgcaacaagaccgacaaggcatctatattagatgaagcaatcgagtatctgaagtcactccaaatgcaagttcagatcatgtggatgactactgggatggcaccaatgatgttccctggtgctcaccagttcatgccaccaatggccgtgggcatgaattctgcgtgcatgcctgcggcacaaggcctaagtcacatgtcaagattgccatacatgaaccattctatgccaaatcacatccctctaaattcatctccagctatgaacccaatgaatgttgcaaaccagatgcagaacattcaactgagagaggcaagcaatcccttccttcacccagatggctggcaaacagtgccaccacaggtatcaggaccatatgcttctgggcctcaagtagcacagcaaaaccagataccgaaagcgtcagctagcactgttctgccaaattctggggctgaacaaccaccaacctctgatggaatttag

SEQ ID NO: 321 - protein, 421 aa, Oryza sativa
MDGNARSAANQTKQIVTDNELVELLWHNGGVVAQPQAAQARVVSSSGRGQSASVLTGDDTETAAWFPDTLDDALEKDLYTQLWRSVTGDAFPAAAAAGPSSHHAPPPDLPPPAARPPMRSGIGSSWTGDICSAFCGSNHIPETAAQRCRDAGAALPPERPRRSSTHDGAGTSSSGGSGSNFGASGLPSESASAHKRKGREDSDSRSEDAECEATEETKSSSRRYGSKRRTRAAEVHNLSERRRRDRINEKMRALQELIPHCNKTDKASILDEAIEYLKSLQMQVQIMWMTTGMAPMMFPGAHQFMPPMAVGMNSACMPAAQGLSHMSRLPYMNHSMPNHIPLNSSPAMNPMNVANQMQNIQLREASNPFLHPDGWQTVPPQVSGPYASGPQVAQQNQIPKASASTVLPNSGAEQPPTSDGI

SEQ ID NO: 322 - DNA, 828 bp, Oryza sativa
atggcgatttgcagcacggacaacgagctggtggagctgctatggcacaacggcggcgtcgtggcgcagccgcaggcggcgcaggcgagggtcgtctcctcctccggccgcggccagagcgccagcgtgctcaccggcgacgacacggagaccgccgcgtggttcccggacaccctcgacgacgcgctggagaaggacctctacacgcagctctggcgcagcgtcaccggcgacgcgttcccggcggccgcggcggcggggccgagctctcaccacgctccgccgccggacttgccgcccccggcggcgaggccgccgatgaggagcggcatcgggtcgagctggaccggcgacatctgttcggccttctgcggcagcaaccacatcccggagacggcggcgcagcgctgccgggacgccggcgcggcattgccgccggagcggccgcgccggtcgagcacccacgacggcgccggcacgtcgtcgtcgggcggctccggcagcaacttcggcgcttccggcttgcccagcgagagcgccagtgcccacaagaggaaaggcagagaagattcagacagtcgcagtgaggatgctgaatgcgaggcaaccgaagagaccaaatcgtcgtcgcggcgatatggatcaaagaggagaactcgtgcagctgaagttcataacctgtcagagaggagaagaagggatcggatcaacgagaagatgcgcgcattgcaagaactcatacctcattgcaacaagaccgacaaggcatctatattagatgaagcaatcgagtatctgaagtcactccaaatgcaagttcaggtttga

SEQ ID NO: 323 - protein, 275 aa, Oryza sativa
MAICSTDNELVELLWHNGGVVAQPQAAQARVVSSSGRGQSASVLTGDDTETAAWFPDTLDDALEKDLYTQLWRSVTGDAFPAAAAAGPSSHHAPPPDLPPPAARPPMRSGIGSSWTGDICSAFCGSNHIPETAAQRCRDAGAALPPERPRRSSTHDGAGTSSSGGSGSNFGASGLPSESASAHKRKGREDSDSRSEDAECEATEETKSSSRRYGSKRRTRAAEVHNLSERRRRDRINEKMRALQELIPHCNKTDKASILDEAIEYLKSLQMQVQV

SEQ ID NO: 324 - DNA, 861 bp, Oryza sativa
atggatggcaatgcgagatcggcggcgaatcagacgaagcaaatcgtcacggacaacgagctggtggagctgctatggcacaacggcggcgtcgtggcgcagccgcaggcggcgcaggcgagggtcgtctcctcctccggccgcggccagagcgccagcgtgctcaccggcgacgacacggagaccgccgcgtggttcccggacaccctcgacgacgcgctggagaaggacctctacacgcagctctggcgcagcgtcaccggcgacgcgttcccggcggccgcggcggcggggccgagctctcaccacgctccgccgccggacttgccgcccccggcggcgaggccgccgatgaggagcggcatcgggtcgagctggaccggcgacatctgttcggccttctgcggcagcaaccacatcccggagacggcggcgcagcgctgccgggacgccggcgcggcattgccgccggagcggccgcgccggtcgagcacccacgacggcgccggcacgtcgtcgtcgggcggctccggcagcaacttcggcgcttccggcttgcccagcgagagcgccagtgcccacaagaggaaaggcagagaagattcagacagtcgcagtgaggatgctgaatgcgaggcaaccgaagagaccaaatcgtcgtcgcggcgatatggatcaaagaggagaactcgtgcagctgaagttcataacctgtcagagaggagaagaagggatcggatcaacgagaagatgcgcgcattgcaagaactcatacctcattgcaacaagaccgacaaggcatctatattagatgaagcaatcgagtatctgaagtcactccaaatgcaagttcaggtttga

SEQ ID NO: 325 - protein, 286 aa, Oryza sativa
MDGNARSAANQTKQIVTDNELVELLWHNGGVVAQPQAAQARVVSSSGRGQSASVLTGDDTETAAWFPDTLDDALEKDLYTQLWRSVTGDAFPAAAAAGPSSHHAPPPDLPPPAARPPMRSGIGSSWTGDICSAFCGSNHIPETAAQRCRDAGAALPPERPRRSSTHDGAGTSSSGGSGSNFGASGLPSESASAHKRKGREDSDSRSEDAECEATEETKSSSRRYGSKRRTRAAEVHNLSERRRRDRINEKMRALQELIPHCNKTDKASILDEAIEYLKSLQMQVQV

SEQ ID NO: 326 - DNA, 1170 bp, Oryza sativa
atggatggcaatgcgagatcggcggcgaatcagacgaagcaaatcgtcacggacaacgagctggtggagctgctatggcacaacggcggcgtcgtggcgcagccgcaggcggcgcaggcgagggtcgtctcctcctccggccgcggccagagcgccagcgtgctcaccggcgacgacacggagaccgccgcgtggttcccggacaccctcgacgacgcgctggagaaggacctctacacgcagctctggcgcagcgtcaccggcgacgcgttcccggcggccgcggcggcggggccgagctctcaccacgctccgccgccggacttgccgcccccggcggcgaggccgccgatgaggagcggcatcgggtcgagctggaccggcgacatctgttcggccttctgcggcagcaaccacatcccggagacggcggcgcagcgctgccgggacgccggcgcggcattgccgccggagcggccgcgccggtcgagcacccacgacggcgccggcacgtcgtcgtcgggcggctccggcagcaacttcggcgcttccggcttgcccagcgagagcgccagtgcccacaagaggaaaggcagagaagattcagacagtcgcagtgaggatgctgaatgcgaggcaaccgaagagaccaaatcgtcgtcgcggcgatatggatcaaagaggagaactcgtgcagctgaagttcataacctgtcagagaggagaagaagggatcggatcaacgagaagatgcgcgcattgcaagaactcatacctcattgcaacaagaccgacaaggcatctatattagatgaagcaatcgagtatctgaagtcactccaaatgcaagttcagatcatgtggatgactactgggatggcaccaatgatgttccctggtgctcaccagttcatgccaccaatggccgtgggcatgaattctgcgtgcatgcctgcggcacaaggcctaagtcacatgtcaagattgccatacatgaaccattctatgccaaatcacatccctctaaattcatctccagctatgaacccaatgaatgttgcaaaccagatgcagaacattcaactgagagaggcaagcaatcccttccttcacccagatggctggcaaacagtgccaccacaggaccatatgcttctgggcctcaagtag

SEQ ID NO: 327 - protein, 389 aa, Oryza sativa
MDGNARSAANQTKQIVTDNELVELLWHNGGVVAQPQAAQARVVSSSGRGQSASVLTGDDTETAAWFPDTLDDALEKDLYTQLWRSVTGDAFPAAAAAGPSSHHAPPPDLPPPAARPPMRSGIGSSWTGDICSAFCGSNHIPETAAQRCRDAGAALPPERPRRSSTHDGAGTSSSGGSGSNFGASGLPSESASAHKRKGREDSDSRSEDAECEATEETKSSSRRYGSKRRTRAAEVHNLSERRRRDRINEKMRALQELIPHCNKTDKASILDEAIEYLKSLQMQVQIMWMTTGMAPMMFPGAHQFMPPMAVGMNSACMPAAQGLSHMSRLPYMNHSMPNHIPLNSSPAMNPMNVANQMQNIQLREASNPFLHPDGWQTVPPQDHMLLGLK

SEQ ID NO: 328 - DNA, 1257 bp, Oryza sativa
atggatgcgggtgcaactgcaaggtcgtcgtcgtcgtcggcgatgatgatgaaccagaagaagcccttgctctcggatggcgagctggtggagctcctgtggcaggacgggggcgtcgtcgcgcacgcgcagacgcgccaccgatcgtccgacgtcctcgcccggagcggcgtcaccggcgaggaggagacggcgtccgcgtggttcgcggatggcggtggcggcggcggcggcgacgacgacgcgctgggcctgggcatgggcagggacatctactcgcagctctggcacagcttcgccaatgtcgacgggcacgcggcgggcgcgctcgcgctcgcgacgccgacgccgacgccgcgggcggcggcgaggagcgacgacgtgtcgagccgtctcgacgaggccgacctgagcatctgcggcagcaacgcggtcgtggcgccggcgctgcccgcggacgacgacgacgacatcgacgccgccgcgccgcgcgaggaggaggaggaggaggaggaggggccgggcgccgcgcgcgccgccggcgcgtcgtcgtcgggcgggtcggggagcgggagcgggagctacccgctgttcaagcgggggagggaggagctggttgacagccttagcgaggtcgccgacgagacccggccgtcgaagcggccggcggcgaagcgccggactcgcgccgccgaggtccacaacctgtcagagcgtagaagaagggataggatcaatgagaagttgagagcattgcaagaactggtacctcattgcaacaagactgacaaagcatccatactagatgaagcaattgagtacttgaagtccctgcaaatgcaagttcagatcatgtggatgactaccgggattgtgccgatgatgttccccggtacccaccagctcatgccaccgatgggcatgggattgaacacggcatgcatgcctggggctcaagctcaaggcctgaatcagatgcaaagaacaacatattacatgaacaattctctgccaaaccagatgcctcagatcccttctccagctatgaatgcacccagtgttccagacgatatgcagaatgataatcgcatccgcgggccaagaaatccttttcttcattgcaatgatacactgacagcaacagctcaggtgccaggtttgtttacctatggatctcaaattgcagaacaaaatgagattcaggagttactctctggcgctgtcattccatcctcatctgatgggaccataaaataa

SEQ ID NO: 329 - protein, 418 aa, Oryza sativa
MDAGATARSSSSSAMMMNQKKPLLSDGELVELLWQDGGVVAHAQTRHRSSDVLARSGVTGEEETASAWFADGGGGGGGDDDALGLGMGRDIYSQLWHSFANVDGHAAGALALATPTPTPRAAARSDDVSSRLDEADLSICGSNAVVAPALPADDDDDIDAAAPREEEEEEEEGPGAARAAGASSSGGSGSGSGSYPLFKRGREELVDSLSEVADETRPSKRPAAKRRTRAAEVHNLSERRRRDRINEKLRALQELVPHCNKTDKASILDEAIEYLKSLQMQVQIMWMTTGIVPMMFPGTHQLMPPMGMGLNTACMPGAQAQGLNQMQRTTYYMNNSLPNQMPQIPSPAMNAPSVPDDMQNDNRIRGPRNPFLHCNDTLTATAQVPGLFTYGSQIAEQNEIQELLSGAVIPSSSDGTIK

SEQ ID NO: 330 - DNA, 1575 bp, Arabidopsis thaliana
atgcctctgtttgagcttttcaggctcaccaaagctaagcttgaatctgctcaagacaggaacccttctccacctgtagatgaagttgtggagctggtgtgggaaaatggtcagatatcaactcaaagtcagtcaagtagatcgaggaacattcctccaccacaagcaaactcttctagagctagagagattggaaatggctcaaagacgactatggtggacgagatccctatgtcagtgccatcactaatgacgggtttgagtcaagacgatgactttgttccatggttgaatcatcatccctcccttgatggatattgctctgatttcttgcgtgatgtgtcgtctcctgttactgtcaacgagcaagagagtgatatggcggtaaaccaaactgctttcccgttgtttcagagaagaaaggatggcaatgaatcagctcctgctgcttcttcgtcgcagtataacggtttccaatcgcattctctgtatggaagtgatagagctagagatcttcctagccaacaaaccaatccggatcggtttactcagacgcaggaaccactaattactagtaacaagcctagtttggtcaacttttcacatttcttacgccctgcaacttttgcgaagactactaataataaccttcatgacactaaagaaaagagtcctcaaagcccgccaaatgtgtttcagaccagagttcttggagctaaagactctgaagataaggttcttaacgagtctgttgcttctgctacgcctaaagataaccaaaaggcttgcctaatatcagaggactcatgtagaaaagaccaagagagtgaaaaagcagttgtatgttcttctgttggctcgggtaatagtctcgatggcccatccgaaagtccttcactttctttaaagagaaagcattcgaatattcaagacattgactgtcatagtgaagatgtggaagaagaatcaggagatggaagaaaggaagcaggtccatctcgaacgggtttgggttcaaagagaagccgctctgcagaagtgcataatctgtctgaaaggagacggcgtgataggatcaacgagaagatgcgtgccctgcaagaactcattccaaactgtaacaaggtggacaaagcttcgatgctagatgaagccatcgagtatctcaagtcactccaacttcaagtgcagatcatgtcaatggcgtctggttactatctgccaccggcggttatgttcccaccgggtatggggcattacccggcagcagctgctgcaatggcaatgggtatgggaatgccttatgcaatgggcttgcctgatttgagccgtggtggttcatcggttaaccacggaccacagttccaagtctcggggatgcaacaacaaccagtggcgatgggtattccacgtgtctctggtggtggtatctttgccggttcttcgacgattggcaatggctcgactagagatttatctggttctaaagatcaaacaacgacgaataacaacagtaacttgaaaccaataaagagaaaacaggggtcttctgatcagttttgtggatcgtcgtga

SEQ ID NO: 331 - protein, 524 aa, Oryza sativa
MPLFELFRLTKAKLESAQDRNPSPPVDEVVELVWENGQISTQSQSSRSRNIPPPQANSSRAREIGNGSKTTMVDEIPMSVPSLMTGLSQDDDFVPWLNHHPSLDGYCSDFLRDVSSPVTVNEQESDMAVNQTAFPLFQRRKDGNESAPAASSSQYNGFQSHSLYGSDRARDLPSQQTNPDRFTQTQEPLITSNKPSLVNFSHFLRPATFAKTTNNNLHDTKEKSPQSPPNVFQTRVLGAKDSEDKVLNESVASATPKDNQKACLISEDSCRKDQESEKAVVCSSVGSGNSLDGPSESPSLSLKRKHSNIQDIDCHSEDVEEESGDGRKEAGPSRTGLGSKRSRSAEVHNLSERRRRDRINEKMRALQELIPNCNKVDKASMLDEAIEYLKSLQLQVQIMSMASGYYLPPAVMFPPGMGHYPAAAAAMAMGMGMPYAMGLPDLSRGGSSVNHGPQFQVSGMQQQPVAMGIPRVSGGGIFAGSSTIGNGSTRDLSGSKDQTTTNNNSNLKPIKRKQGSSDQFCGSS

SEQ ID NO: 332 - DNA, 1233 bp, Oryza sativa
atggcgatttgcagcacggacaacgagctggtggagctgctatggcacaacggcggcgtcgtggcgcagccgcaggcggcgcaggcgagggtcgtctcctcctccggccgcggccagagcgccagcgtgctcaccggcgacgacacggagaccgccgcgtggttcccggacaccctcgacgacgcgctggagaaggacctctacacgcagctctggcgcagcgtcaccggcgacgcgttcccggcggccgcggcggcggggccgagctctcaccacgctccgccgccggacttgccgcccccggcggcgaggccgccgatgaggagcggcatcgggtcgagctggaccggcgacatctgttcggccttctgcggcagcaaccacatcccggagacggcggcgcagcgctgccgggacgccggcgcggcattgccgccggagcggccgcgccggtcgagcacccacgacggcgccggcacgtcgtcgtcgggcggctccggcagcaacttcggcgcttccggcttgcccagcgagagcgccagtgcccacaagaggaaaggcagagaagattcagacagtcgcagtgaggatgctgaatgcgaggcaaccgaagagaccaaatcgtcgtcgcggcgatatggatcaaagaggagaactcgtgcagctgaagttcataacctgtcagagaggagaagaagggatcggatcaacgagaagatgcgcgcattgcaagaactcatacctcattgcaacaagaccgacaaggcatctatattagatgaagcaatcgagtatctgaagtcactccaaatgcaagttcagatcatgtggatgactactgggatggcaccaatgatgttccctggtgctcaccagttcatgccaccaatggccgtgggcatgaattctgcgtgcatgcctgcggcacaaggcctaagtcacatgtcaagattgccatacatgaaccattctatgccaaatcacatccctctaaattcatctccagctatgaacccaatgaatgttgcaaaccagatgcagaacattcaactgagagaggcaagcaatcccttccttcacccagatggctggcaaacagtgccaccacaggtatcaggaccatatgcttctgggcctcaagtagcacagcaaaaccagataccgaaagcgtcagctagcactgttctgccaaattctggggctgaacaaccaccaacctctgatggaatttag

SEQ ID NO: 333 - protein, 410 aa, Oryza sativa
MAICSTDNELVELLWHNGGVVAQPQAAQARVVSSSGRGQSASVLTGDDTETAAWFPDTLDDALEKDLYTQLWRSVTGDAFPAAAAAGPSSHHAPPPDLPPPAARPPMRSGIGSSWTGDICSAFCGSNHIPETAAQRCRDAGAALPPERPRRSSTHDGAGTSSSGGSGSNFGASGLPSESASAHKRKGREDSDSRSEDAECEATEETKSSSRRYGSKRRTRAAEVHNLSERRRRDRINEKMRALQELIPHCNKTDKASILDEAIEYLKSLQMQVQIMWMTTGMAPMMFPGAHQFMPPMAVGMNSACMPAAQGLSHMSRLPYMNHSMPNHIPLNSSPAMNPMNVANQMQNIQLREASNPFLHPDGWQTVPPQVSGPYASGPQVAQQNQIPKASASTVLPNSGAEQPPTSDGI

SEQ ID NO: 334 - DNA, 1344 bp, Oryza sativa
atggatgcgggtgcaactgcaaggtcgtcgtcgtcgtcggcgatgatgatgaaccagaagaagcccttgctctcggatggcgagctggtggagctcctgtggcaggacgggggcgtcgtcgcgcacgcgcagacgcgccaccgatcgtccgacgtcctcgcccggagcggcgtcaccggcgaggaggagacggcgtccgcgtggttcgcggatggcggtggcggcggcggcggcgacgacgacgcgctgggcctgggcatgggcagggacatctactcgcagctctggcacagcttcgccaatgtcgacgggcacgcggcgggcgcgctcgcgctcgcgacgccgacgccgacgccgcgggcggcggcgaggagcgacgacgtgtcgagccgtctcgacgaggccgacctgagcatctgcggcagcaacgcggtcgtggcgccggcgctgcccgcggacgacgacgacgacatcgacgccgccgcgccgcgcgaggaggaggaggaggaggaggaggggccgggcgccgcgcgcgccgccggcgcgtcgtcgtcgggcgggtcggggagcgggagcgggagctacccgctgttcaagcgggggagggaggagctggttgacagccttagcgaggtcgccgacgagacccggccgtcgaagcggccggcggcgaagcgccggactcgcgccgccgaggtccacaacctgtcagagcgtagaagaagggataggatcaatgagaagttgagagcattgcaagaactggtacctcattgcaacaagactgacaaagcatccatactagatgaagcaattgagtacttgaagtccctgcaaatgcaagttcagatcatgtggatgactaccgggattgtgccgatgatgttccccggtacccaccagctcatgccaccgatgggcatgggattgaacacggcatgcatgcctggggctcaagctcaaggcctgaatcagatgcaaagaacaacatattacatgaacaattctctgccaaaccagatgcctcagatcccttctccagctatgaatgcacccagtgttccagacgatatgcagaatgataatcgcatccgcgggccaagaaatccttttcttcattgcaatgatacactgacagcaacagctcaggttgattattatgttaaatttcatcattaccgatcattcagacttcaattcttgtttatcttacaatatcagttcttttcaggtgccaggcaccggcaatatgtgaagaatatagtggctgtgtggactcagcttgagccggcatcgcaaaagctgcacaagaacacaacagtgacagtttcactcttcttttag

SEQ ID NO: 335 - protein, 447 aa, Oryza sativa
MDAGATARSSSSSAMMMNQKKPLLSDGELVELLWQDGGVVAHAQTRHRSSDVLARSGVTGEEETASAWFADGGGGGGGDDDALGLGMGRDIYSQLWHSFANVDGHAAGALALATPTPTPRAAARSDDVSSRLDEADLSICGSNAVVAPALPADDDDDIDAAAPREEEEEEEEGPGAARAAGASSSGGSGSGSGSYPLFKRGREELVDSLSEVADETRPSKRPAAKRRTRAAEVHNLSERRRRDRINEKLRALQELVPHCNKTDKASILDEAIEYLKSLQMQVQIMWMTTGIVPMMFPGTHQLMPPMGMGLNTACMPGAQAQGLNQMQRTTYYMNNSLPNQMPQIPSPAMNAPSVPDDMQNDNRIRGPRNPFLHCNDTLTATAQVDYYVKFHHYRSFRLQFLFILQYQFFSGARHRQYVKNIVAVWTQLEPASQKLHKNTTVTVSLFF

SEQ ID NO: 336 - DNA, 2202 bp, Populus trichocarpa
atggctaaaggaaagattgatttttctcaagagaaggatcctagttgttcaactgatctgtcttttgtcagacctgagaatgactttggtgagctaatatgggaaaatggtcagattcaatccagtagagctagaaagatacaaccttgtagcaccttaccatgtcaaaaccccaagattcgatataaagacataggaaatggcaccgatattagaacaggaaagtttgggatgatggagtctacactgaatgaactcccgatgtcagttcccgctgttgaaatgggggtgaatcaagatgatgacatggtgccttggttgaattatccattggatgaatctcctcaacatgattattgttctgaatttttgcccgagttatctggtgttactgtaaatggacactcctcccagagtaattttccgtcgtttggtaaaaaaagttttagccagtcagttagggactcccgtactgtttctgtacataatggtttgagtttagagcaaggagatgtggcgaagaattcttcagcaggggatactgaagctaataggcctagaactagtgctagccagttatatctatcatcttctgagcattgccaaacatcatttccatattttagatccagagtttcagctaaaaatggtgatagtacaagcaatgctgcccaccatgtcgtttcagtggattctattcgagctccaacatcaggaggtggttttcccagcataaagatgcagaagcaagttccagcacaatccacaaccaactccagtttgatgaatttctctcattttgcaagacctgctgctcttgcgaaagctaatcttcagaacattggcatgagagctggtacagggatttcaaacatggaaagaacgcaaaataaagataagggctcaattgcaagtagtagcaatccggctgaatgcactcccattaattcatgtagtggtttgctaaaggaaacgagctcccattgtcttcctgttctgatgccacccaaggttgacgctaaaccatcagaggctaagcctgcagaaggatttgttcctgctgagctacctgaggctacaattccagaaggtgactcaaaaagtgatagaaactgtcgtcaaaacttttgtgaaagtgcaattaaaggagtagcagatgttgagaagactaaagagcccgtggttgcttcttcttctgttggctcggacaatagtgtggagagagcttcggatgatccaactgagaatctgaagagaaaacatcgagatactgaggagtctgaaggtcctagtgaagatgtagaagaagaatctgtaggtgcaaaaaaacaagctcctgctcgagcaggtaatggctccaagagaaaccgggctgcagaagttcataatttatctgaaaggaggcgaagggataggatcaacgaaaagatgcgggccctacaagaactcataccaaactgtaacaaggtggataaagcttcaatgcttgatgaggccattgagtatttaaagacgcttcagcttcaagtacagatcatgtcaatgggagctggattgtatatgccatcaatgatgttaccccctggaatgcctcacatgcatgcagctcatatggggcagttcttacccatgggtgtgggaatgggaatgcgtatgggaatgggaatgggttttgggatgagtatgccagacgtgaatggtggatcttctggttgccctatgtatcaagtgcctcctatgcatggaccgcatttctctggccagccaatgtcagggctaagtgctttgcataggatgggaggatcgaatcttcagatgtttggcctttcaggtcaaggatttccaatgtcatttccctgtgcacccttagtgccaatgtctggagggcctcctctgaaaacaaacatggaaccaaatgcttgtggtgtggtaggtgctacggataatttggattcagctacggcctgtagttcacatgaagcaattcagaaaatcaactcgcaagtgatgcagaataatgttgtcaatagctcaatgaatcagacctctagtcagtgccaggcaacaaatgaatgctttgaacaacctgctttggtgcaaaataatgctcaagactcaggagttgctgacaacagagcattgaagtcggttggtggaaatgacaatgtaccaagtagtgaggctggtgagcatttgcaataa

SEQ ID NO: 337 - protein, 733 aa, Populus trichocarpa
MAKGKIDFSQEKDPSCSTDLSFVRPENDFGELIWENGQIQSSRARKIQPCSTLPCQNPKIRYKDIGNGTDIRTGKFGMMESTLNELPMSVPAVEMGVNQDDDMVPWLNYPLDESPQHDYCSEFLPELSGVTVNGHSSQSNFPSFGKKSFSQSVRDSRTVSVHNGLSLEQGDVAKNSSAGDTEANRPRTSASQLYLSSSEHCQTSFPYFRSRVSAKNGDSTSNAAHHVVSVDSIRAPTSGGGFPSIKMQKQVPAQSTTNSSLMNFSHFARPAALAKANLQNIGMRAGTGISNMERTQNKDKGSIASSSNPAECTPINSCSGLLKETSSHCLPVLMPPKVDAKPSEAKPAEGFVPAELPEATIPEGDSKSDRNCRQNFCESAIKGVADVEKTKEPVVASSSVGSDNSVERASDDPTENLKRKHRDTEESEGPSEDVEEESVGAKKQAPARAGNGSKRNRAAEVHNLSERRRRDRINEKMRALQELIPNCNKVDKASMLDEAIEYLKTLQLQVQIMSMGAGLYMPSMMLPPGMPHMHAAHMGQFLPMGVGMGMRMGMGMGFGMSMPDVNGGSSGCPMYQVPPMHGPHFSGQPMSGLSALHRMGGSNLQMFGLSGQGFPMSFPCAPLVPMSGGPPLKTNMEPNACGVVGATDNLDSATACSSHEAIQKINSQVMQNNVVNSSMNQTSSQCQATNECFEQPALVQNNAQDSGVADNRALKSVGGNDNVPSSEAGEHLQ

SEQ ID NO: 338 - DNA, 1848 bp, Populus trichocarpa
atgaatccttatgttcctgattttgaaatggacgatgattactctctcccacctcctccttcaacccatactcgccccagaaaaccagccatgcaggaagaagagatcatggagctactatggcagaacggccaagtagtgatgcatagtcaaagatctcaaaagaaatcatctcctccaccgtccgagttggatgatgcggtgctcccagctgatcaattacctggtactaaagagatccgatcatcacatgatcaacaacaagaacatcaccatctttttatgcaagaagatgagatggcttcttggcttaatcatcctctaaacgacaccaatttcgaccatgatttctgcgccgatttgctatatcctccgacagcttccaccgcttccatcaccagggaagctgctgtcaccaacgccgctgcgtctactgttcgaggtgcgactcagagaatggaagctaggagttatccggcggtatcggcgccgaggccgccgataccgccggtgaggagagcggaggtggtgcagaacttcgcgtacttctcgaggcaccgagcgggaggagtttcggaatctggacggtctaattcgaagagcgtggtgagggaatcgacggttgttgactcgtgtgagactccaacagcgagaatttcggagacggcgtttgctagaagtgcggataacacgtgtgggaccattaacggcgctgctgtagcaggcacggtttctagtgctccctcaagtaatagagagacgatgacgaatccttgtgagatgacctccacgtcatcacctggttgctcgagtgctagcgctgagctgccggctctgatgtctccagtggaagaccggaagcggaagggaagagaagaggaagctgagtgtcatagcgagtttattgcaataagcattacaatggcacatggtaatcaacctcagtcagtagcaatcaggcagaaaacccaaaacagtgcagacagctcgaaacctcttcagggtagaagagatgccgcaaatccactaaaggatgctgagtttgaatctgctgatgcaaagaaacgaattcgtggatcaatgtcttcgaagagatctcgtgcagcagaagttcacaacctatcagaaaggagacgccgagatcggatcaatgaaaagatgagggctttgcaagagctcatacctcgttgcaacaagtcggacaaagcttctatgttagatgaggcaattgagtacctgaaatcgcttcagttgcaagtacagatgatgtctatgggatgcagcatggtccccatgatgtttcctggcttccagcagtacatgccgccaatggggatagggatgggcatgggcatggaaatgggattgagtcggccaatgatgccatttcccaatattttggcgggtgcaccctcagcaacaccagctgcagcagctcatttggtccctaggttccctgtgccgccctttcatgtgccccccatccctgctcctgatccatccagagtccaaccaaccaaccaggtagatcctatgctaggctcaccaggtcaacagaatccaaaccaaccacgagtcccaaattttgttgatccatatcagcactatcttggcctctaccagatgcatttaccaggagtaccacggaaccaagctatggctcagccaagtaccagcaagccaagtactagtcgagtagctgagaatcctggcaatcaccagtcaggttgtgatggggaaaaaatggctcatgcttttccttcaagtcaggctaaaaaacaggagtggaaaatggggaaaggaataaatggagttatgctacgtgggtgtccacctctatctcaatag

SEQ ID NO: 339 - protein, 615 aa, Populus trichocarpa
MNPYVPDFEMDDDYSLPPPPSTHTRPRKPAMQEEEIMELLWQNGQVVMHSQRSQKKSSPPPSELDDAVLPADQLPGTKEIRSSHDQQQEHHHLFMQEDEMASWLNHPLNDTNFDHDFCADLLYPPTASTASITREAAVTNAAASTVRGATQRMEARSYPAVSAPRPPIPPVRRAEVVQNFAYFSRHRAGGVSESGRSNSKSVVRESTVVDSCETPTARISETAFARSADNTCGTINGAAVAGTVSSAPSSNRETMTNPCEMTSTSSPGCSSASAELPALMSPVEDRKRKGREEEAECHSEFIAISITMAHGNQPQSVAIRQKTQNSADSSKPLQGRRDAANPLKDAEFESADAKKRIRGSMSSKRSRAAEVHNLSERRRRDRINEKMRALQELIPRCNKSDKASMLDEAIEYLKSLQLQVQMMSMGCSMVPMMFPGFQQYMPPMGIGMGMGMEMGLSRPMMPFPNILAGAPSATPAAAAHLVPRFPVPPFHVPPIPAPDPSRVQPTNQVDPMLGSPGQQNPNQPRVPNFVDPYQHYLGLYQMHLPGVPRNQAMAQPSTSKPSTSRVAENPGNHQSGCDGEKMAHAFPSSQAKKQEWKMGKGINGVMLRGCPPLSQ

SEQ ID NO: 340 - DNA, 2229 bp, Populus trichocarpa
atgcctttgtctgagctattatatcgaatggctaaaggaaagattgatttttctcaagagaaggatcctagttgttcaactgatctgtcttttgtcagacctgagaatgactttggtgagctaatatgggaaaatggtcagattcaatccagtagagctagaaagatacaaccttgtagcaccttaccatgtcaaaaccccaagattcgatataaagacataggaaatggcaccgatattagaacaggaaagtttgggatgatggagtctacactgaatgaactcccgatgtcagttcccgctgttgaaatgggggtgaatcaagatgatgacatggtgccttggttgaattatccattggatgaatctcctcaacatgattattgttctgaatttttgcccgagttatctggtgttactgtaaatggacactcctcccagagtaattttccgtcgtttggtaaaaaaagttttagccagtcagttagggactcccgtactgtttctgtacataatggtttgagtttagagcaaggagatgtggcgaagaattcttcagcaggggatactgaagctaataggcctagaactagtgctagccagttatatctatcatcttctgagcattgccaaacatcatttccatattttagatccagagtttcagctaaaaatggtgatagtacaagcaatgctgcccaccatgtcgtttcagtggattctattcgagctccaacatcaggaggtggttttcccagcataaagatgcagaagcaagttccagcacaatccacaaccaactccagtttgatgaatttctctcattttgcaagacctgctgctcttgcgaaagctaatcttcagaacattggcatgagagctggtacagggatttcaaacatggaaagaacgcaaaataaagataagggctcaattgcaagtagtagcaatccggctgaatgcactcccattaattcatgtagtggtttgctaaaggaaacgagctcccattgtcttcctgttctgatgccacccaaggttgacgctaaaccatcagaggctaagcctgcagaaggatttgttcctgctgagctacctgaggctacaattccagaaggtgactcaaaaagtgatagaaactgtcgtcaaaacttttgtgaaagtgcaattaaaggagtagcagatgttgagaagactaaagagcccgtggttgcttcttcttctgttggctcggacaatagtgtggagagagcttcggatgatccaactgagaatctgaagagaaaacatcgagatactgaggagtctgaaggtcctagtgaagatgtagaagaagaatctgtaggtgcaaaaaaacaagctcctgctcgagcaggtaatggctccaagagaaaccgggctgcagaagttcataatttatctgaaaggaggcgaagggataggatcaacgaaaagatgcgggccctacaagaactcataccaaactgtaacaaggtggataaagcttcaatgcttgatgaggccattgagtatttaaagacgcttcagcttcaagtacagatcatgtcaatgggagctggattgtatatgccatcaatgatgttaccccctggaatgcctcacatgcatgcagctcatatggggcagttcttacccatgggtgtgggaatgggaatgcgtatgggaatgggaatgggttttgggatgagtatgccagacgtgaatggtggatcttctggttgccctatgtatcaagtgcctcctatgcatggaccgcatttctctggccagccaatgtcagggctaagtgctttgcataggatgggaggatcgaatcttcagatgtttggcctttcaggtcaaggatttccaatgtcatttccctgtgcacccttagtgccaatgtctggagggcctcctctgaaaacaaacatggaaccaaatgcttgtggtgtggtaggtgctacggataatttggattcagctacggcctgtagttcacatgaagcaattcagaaaatcaactcgcaagtgatgcagaataatgttgtcaatagctcaatgaatcagacctctagtcagtgccaggcaacaaatgaatgctttgaacaacctgctttggtgcaaaataatgctcaagactcaggagttgctgacaacagagcattgaagtcggttggtggaaatgacaatgtaccaagtagtgaggctggtgagcatttgcaataa

SEQ ID NO: 341 - protein, 742 aa, Populus trichocarpa
MPLSELLYRMAKGKIDFSQEKDPSCSTDLSFVRPENDFGELIWENGQIQSSRARKIQPCSTLPCQNPKIRYKDIGNGTDIRTGKFGMMESTLNELPMSVPAVEMGVNQDDDMVPWLNYPLDESPQHDYCSEFLPELSGVTVNGHSSQSNFPSFGKKSFSQSVRDSRTVSVHNGLSLEQGDVAKNSSAGDTEANRPRTSASQLYLSSSEHCQTSFPYFRSRVSAKNGDSTSNAAHHVVSVDSIRAPTSGGGFPSIKMQKQVPAQSTTNSSLMNFSHFARPAALAKANLQNIGMRAGTGISNMERTQNKDKGSIASSSNPAECTPINSCSGLLKETSSHCLPVLMPPKVDAKPSEAKPAEGFVPAELPEATIPEGDSKSDRNCRQNFCESAIKGVADVEKTKEPVVASSSVGSDNSVERASDDPTENLKRKHRDTEESEGPSEDVEEESVGAKKQAPARAGNGSKRNRAAEVHNLSERRRRDRINEKMRALQELIPNCNKVDKASMLDEAIEYLKTLQLQVQIMSMGAGLYMPSMMLPPGMPHMHAAHMGQFLPMGVGMGMRMGMGMGFGMSMPDVNGGSSGCPMYQVPPMHGPHFSGQPMSGLSALHRMGGSNLQMFGLSGQGFPMSFPCAPLVPMSGGPPLKTNMEPNACGVVGATDNLDSATACSSHEAIQKINSQVMQNNVVNSSMNQTSSQCQATNECFEQPALVQNNAQDSGVADNRALKSVGGNDNVPSSEAGEHLQ

SEQ ID NO: 342 - DNA, 1716 bp, Populus trichocarpa
atgaatccttatgttcctgattttgaaatggacgatgattactctctcccacctcctccttcaacccatactcgccccagaaaaccagccatgcaggaagaagagatcatggagctactatggcagaacggccaagtagtgatgcatagtcaaagatctcaaaagaaatcatctcctccaccgtccgagttggatgatgcggtgctcccagctgatcaattacctggtactaaagagatccgatcatcacatgatcaacaacaagaacatcaccatctttttatgcaagaagatgagatggcttcttggcttaatcatcctctaaacgacaccaatttcgaccatgatttctgcgccgatttgctatatcctccgacagcttccaccgcttccatcaccagggaagctgctgtcaccaacgccgctgcgtctactgttcgaggtgcgactcagagaatggaagctaggagttatccggcggtatcggcgccgaggccgccgataccgccggtgaggagagcggaggtggtgcagaacttcgcgtacttctcgaggcaccgagcgggaggagtttcggaatctggacggtctaattcgaagagcgtggtgagggaatcgacggttgttgactcgtgtgagactccaacagcgagaatttcggagacggcgtttgctagaagtgcggataacacgtgtgggaccattaacggcgctgctgtagcaggcacggtttctagtgctccctcaagtaatagagagacgatgacgaatccttgtgagatgacctccacgtcatcacctggttgctcgagtgctagcgctgagctgccggctctgatgtctccagtggaagaccggaagcggaagggaagagaagaggaagctgagtgtcatagcgaggatgctgagtttgaatctgctgatgcaaagaaacgaattcgtggatcaatgtcttcgaagagatctcgtgcagcagaagttcacaacctatcagaaaggagacgccgagatcggatcaatgaaaagatgagggctttgcaagagctcatacctcgttgcaacaagtcggacaaagcttctatgttagatgaggcaattgagtacctgaaatcgcttcagttgcaagtacagatgatgtctatgggatgcagcatggtccccatgatgtttcctggcttccagcagtacatgccgccaatggggatagggatgggcatgggcatggaaatgggattgagtcggccaatgatgccatttcccaatattttggcgggtgcaccctcagcaacaccagctgcagcagctcatttggtccctaggttccctgtgccgccctttcatgtgccccccatccctgctcctgatccatccagagtccaaccaaccaaccaggtagatcctatgctaggctcaccaggtcaacagaatccaaaccaaccacgagtcccaaattttgttgatccatatcagcactatcttggcctctaccagatgcatttaccaggagtaccacggaaccaagctatggctcagccaagtaccagcaagccaagtactagtcgagtagctgagaatcctggcaatcaccagtcaggttgtgatggggaaaaaatggctcatgcttttccttcaagtcaggctaaaaaacaggagtggaaaatggggaaaggaataaatggagttatgctacgtgggtgtccacctctatctcaatag

SEQ ID NO: 343 - protein, 571 aa, Populus trichocarpa
MNPYVPDFEMDDDYSLPPPPSTHTRPRKPAMQEEEIMELLWQNGQVVMHSQRSQKKSSPPPSELDDAVLPADQLPGTKEIRSSHDQQQEHHHLFMQEDEMASWLNHPLNDTNFDHDFCADLLYPPTASTASITREAAVTNAAASTVRGATQRMEARSYPAVSAPRPPIPPVRRAEVVQNFAYFSRHRAGGVSESGRSNSKSVVRESTVVDSCETPTARISETAFARSADNTCGTINGAAVAGTVSSAPSSNRETMTNPCEMTSTSSPGCSSASAELPALMSPVEDRKRKGREEEAECHSEDAEFESADAKKRIRGSMSSKRSRAAEVHNLSERRRRDRINEKMRALQELIPRCNKSDKASMLDEAIEYLKSLQLQVQMMSMGCSMVPMMFPGFQQYMPPMGIGMGMGMEMGLSRPMMPFPNILAGAPSATPAAAAHLVPRFPVPPFHVPPIPAPDPSRVQPTNQVDPMLGSPGQQNPNQPRVPNFVDPYQHYLGLYQMHLPGVPRNQAMAQPSTSKPSTSRVAENPGNHQSGCDGEKMAHAFPSSQAKKQEWKMGKGINGVMLRGCPPLSQ

SEQ ID NO: 344 - DNA, 1347 bp, Populus trichocarpa
atgaatcattgtattcctgattggaattttgagggtgatcttcctgtctccaatcagaagaaacccatagagttgttgattttggttgccccatcttttaccttttgcaggccaggcaatgacctagtagagctgctatggcgaaatgggcaggtagttttgcatagccaggcacacagaaaaccaagccctcatgttcaaaaacatgattcaccaacagtaaagggcagtgggtcaattctgaattcaagccatttgattcaagatgatgacgctgtgtcttggattcaataccctcttgaagattcttttgaaaaggagttctgttccaattttttctcggaattgcctccaccactttctgatcaaattttggaaggaaagtcggctaaatttgatgcctccgcaccttcacagcaacagcatcagcatcagcatcagcgacaactcaacaacaataaacctcatgtggtttctgaattttcaggaaatccaatgccccctccaagaattcaagtcccggagaaaaatcatgctggtgtaggaggatttggtgaagctgttaatgctaacttttctcagttctccgccccctttaaaggaggtgattttagaacttcaagtggacaatttggaggccaggggtctggaaactctccacaaggggaggtcagggagtgttcggtggctgccgaactcgatctcgattcaatggcaggaaacaatccaaccaaacgatcaggatctacccgcaggagtcgtgcagctgaagtgcataacctctcagaaaggagacggagggataggattaatgagaagatgagagcattgcaagagctcatacctcactgctacaagacagataaagcatcaatgctggatgaggcaattgagtacttgaagtcacttcagttacaacttcaggtaatgtggatgggtggtgggatggcccctatgctgtttccaggagtgcagcatttcatgtctcgcatgggaatgggtccccctctgccttctatgcaaaatccaatgcatttgcctagggtccaactcattgatcaatccatttctatggctccgacacagaactcgggagtaatgtgccaagctccagtgttgaatccagttaattttcacaaccagatgcaaaatccggctttcgctgaccagtatgcgcgtttcatgggctttcatatgcaagccgcttctcagcccatgaatatgttccggtttggctcgcaaacagtacagcagaatcaaatgatggcaccaacaagcagtgttggcggacccttgagtgctggaaccgcagtcagtgacgctcctccaagtgacaaggtgggttaa

SEQ ID NO: 345 - protein, 448 aa, Populus trichocarpa
MNHCIPDWNFEGDLPVSNQKKPIELLILVAPSFTFCRPGNDLVELLWRNGQVVLHSQAHRKPSPHVQKHDSPTVKGSGSILNSSHLIQDDDAVSWIQYPLEDSFEKEFCSNFFSELPPPLSDQILEGKSAKFDASAPSQQQHQHQHQRQLNNNKPHVVSEFSGNPMPPPRIQVPEKNHAGVGGFGEAVNANFSQFSAPFKGGDFRTSSGQFGGQGSGNSPQGEVRECSVAAELDLDSMAGNNPTKRSGSTRRSRAAEVHNLSERRRRDRINEKMRALQELIPHCYKTDKASMLDEAIEYLKSLQLQLQVMWMGGGMAPMLFPGVQHFMSRMGMGPPLPSMQNPMHLPRVQLIDQSISMAPTQNSGVMCQAPVLNPVNFHNQMQNPAFADQYARFMGFHMQAASQPMNMFRFGSQTVQQNQMMAPTSSVGGPLSAGTAVSDAPPSDKVG

SEQ ID NO: 346 - DNA, 2142 bp, Populus trichocarpa
atgcctttgtctgagctcctataccgaatggctaagggaaaaactgattcttctcaagagaagaatcctgcttgttcaactgatctgtcttttgtacctgagaatgattttggtgagctaatatgggaaaatggtcagattcaatacagtagagctagaaagatacaaacttgtaacagcttacctcccaagattagagataaagacataggaaatggcaccaatactaaaacaggtaagtttggaacgatggagtctacactgaatgaactccttgcggttcctgctgttgaagtgagggcgaatcaagatgatgacatggtaccttggctgaattatccattggatgaacctctgcaacatgattattgttctgattttttgcccgaattatcgggggttactgtaaatgaacactcctcccagagtaattttccatcgtttgataaaagaagttgtaaccagtcaattacggactcccatactgtttcggtacacaatggtttgaacttagagcaaggagatgtggtgatgaattcttcagcaggagatattgatgctaagaggcctagaaccagtgctagtcagttatatccgtcatcttctgagcaatgcaaaacatcatttccgttttttagatccagggattcaactaaaaaagatgatagtacaagcaatgctgtccaccatgtcattgcaccagattctattcgagctccaacatcaggaggtggttttcccagcataaagatgcagaagcaagttccagcaccatcccctatcaactccagtttaattaatttctctcactttgcaagaccagctgctcttgtaaaagctaatcttcagaacgttggcatgagagctagttctggaacttcaagcatggaaagaatgcaaaataaagataagggctcaattggtttaccaaaggaaacggactcccattgccgtcctaatatgatgtcatccaaggttgaggttaaaccaacagaggttaagcctgctgaaggatctgttcctgctgagctacctgaggaaatgagccaagaaggtgactctaaaagcgatagaaactgtcatcaaaattttggtgaaagtgcaattaaaggattagaagatgttgaaaagactacagaacctctggttgcttcttcttctgttggttcgggcaatagcgcagagagaccttctgacgatccaactgagaatctgaagagaaaacatcgtgatactgaggagtctgaaggtcctagtgaagatgctgaagaagaatcagtaggtgcaaaaaaaccagcttctgctcgagcaggtaatgggtccaagagaggtcgggcagcagaagttcataacttatctgaaaggaggcgaagggataggatcaatgagaagatgcgagccctacaagaactcataccaaactgcaataaggtggataaagcttcaatgcttgatgaggccattgaatatttaaagactcttcagcttcaagtacaaattatgtcaatgggagctggaatgtacatgccatcaatgatgttacctcctggaatgcctcacatgcatgcagctcatatggggcagttcttacccatgggtgttggaatgggaatgggtttccggatgggtatgcctgacatgaatggtggatattctggttgccctatgtatcaagtacctcctatgcatggagcacatttccctggctcgcaaatgtcagggcctagtgctttgcacgggatgggaggacctagtcttcagatgtttgggctttctggtcaaggacttccaatgtcatttcctcgtgcacccttaatgccaatgtctggagggcctcctccgaaaacaaacagggaaccaaatgcttgtggggtggtaggtcctatggataatttggattcagctacagcctctagttcaaaggatgcaattcagaatatcaactcgcaagtgatgcagaacaatgttgccaataggtcaatgaatcagacctctagtcagtgccaagcaacaaatgaatgttttgaacagcctgcttttgcgcaaaataatggtgaaggctcagaagttgctgaaagtggagtgttgaagtcagctggtggaactgacatcacacctagtagagcaactggttgtgactga

SEQ ID NO: 347 - protein, 713 aa, Populus trichocarpa
MPLSELLYRMAKGKTDSSQEKNPACSTDLSFVPENDFGELIWENGQIQYSRARKIQTCNSLPPKIRDKDIGNGTNTKTGKFGTMESTLNELLAVPAVEVRANQDDDMVPWLNYPLDEPLQHDYCSDFLPELSGVTVNEHSSQSNFPSFDKRSCNQSITDSHTVSVHNGLNLEQGDVVMNSSAGDIDAKRPRTSASQLYPSSSEQCKTSFPFFRSRDSTKKDDSTSNAVHHVIAPDSIRAPTSGGGFPSIKMQKQVPAPSPINSSLINFSHFARPAALVKANLQNVGMRASSGTSSMERMQNKDKGSIGLPKETDSHCRPNMMSSKVEVKPTEVKPAEGSVPAELPEEMSQEGDSKSDRNCHQNFGESAIKGLEDVEKTTEPLVASSSVGSGNSAERPSDDPTENLKRKHRDTEESEGPSEDAEEESVGAKKPASARAGNGSKRGRAAEVHNLSERRRRDRINEKMRALQELIPNCNKVDKASMLDEAIEYLKTLQLQVQIMSMGAGMYMPSMMLPPGMPHMHAAHMGQFLPMGVGMGMGFRMGMPDMNGGYSGCPMYQVPPMHGAHFPGSQMSGPSALHGMGGPSLQMFGLSGQGLPMSFPRAPLMPMSGGPPPKTNREPNACGVVGPMDNLDSATASSSKDAIQNINSQVMQNNVANRSMNQTSSQCQATNECFEQPAFAQNNGEGSEVAESGVLKSAGGTDITPSRATGCD

SEQ ID NO: 348 - DNA, 1593 bp, Populus trichocarpa
atgaatcattgcattcctgattggaatcttgagggtgatcttcctgtctccaatcagaagaaccccatagagccagacaatgagctagtagagctgctatggcgaaatgggcaggtggttatgcacagccaaacacaaagaaaaccaaatcctcacgttcaaaaacatgattcaccaacagtaaggggctatgactcaactctgaattcaagtcatttgattcaagatgatgagacagtttcttggattcatgaccctcttgaagattcctttgaaaaggagttctgttccaattttttctccgaattgccaccaccgctttctgatcaaatttcagaagaaaagtcggctaaatttgatgcctcgaaaacttcacatcagcaacaacaactcaacaacaacaagcatccagtggttcctgaatttccaggaaacccaatgccccctccaagaattcaagtccaggagcaaaatcatattagtgtaggaggatttggtaaagctgttaatgttaacttttctcagttctcagctcccctaaaagtgggtgattttagatcttcaagtcgacaatttggaggacaggggtctggagatttttcacaaggagaggccagggagtgctcggtggtgacagtagggtcaagcaaccaaactccacgtgaccgtttcctgagccgtgcttctggtaatgctattgagaccggtacaggcttgtctgccggaccctccatagatgatccacgaaaagtaatctcccagagcgagagaggcaaagctgatcagacacttgatcctactgctacttcatcctcaggtgggtcaggtggtagttttgctagaacatgtaagcaatctgcagtacctagtcgtggccagaaaagaaagaccatggacgcggaggaatctgagtgccaaagtgaggatgccgaacttgattcagcagtggaaaacaagccagccaaacgatcaggatctacccgcaggagccgtgcagctgaagtgcataacctctcagaaaggagacggagggatagaattaatgagaagatgagagcattgcaagagctcatacctcactgcaacaagacagataaagcatcaatgttagatgaggcaattgagtacttgaagtcacttcaattacaacttcaggtaatgtggatgggaagtgggattgtcccagtgatgtttccaggagtgcagcatttcatgtcccgcatgggaatgggaatgggaatgggtccgcctcctttgccttctatgcaaaatcctatgcatttgcctagggtcccacttgttgatcaatccatttctatggctcccacacagaaccaggcagtaatttgccaaactccagtactgaatccagttaattatcaaaatcagatgcaaaatcctactttctctgatcagtatgcacgtttcatgggttttcatatgcaagctgcttctcagcccatgaatatgttccggtttggctcgcaaacagtacagcagaaccaaatgatggcaccaccaaacagtggcggtggacccttgagtgctggaactgcagccagtgatgctcctccgagtggcaagacgggttaa

SEQ ID NO: 349 - protein, 530 aa, Populus trichocarpa
MNHCIPDWNLEGDLPVSNQKNPIEPDNELVELLWRNGQVVMHSQTQRKPNPHVQKHDSPTVRGYDSTLNSSHLIQDDETVSWIHDPLEDSFEKEFCSNFFSELPPPLSDQISEEKSAKFDASKTSHQQQQLNNNKHPVVPEFPGNPMPPPRIQVQEQNHISVGGFGKAVNVNFSQFSAPLKVGDFRSSSRQFGGQGSGDFSQGEARECSVVTVGSSNQTPRDRFLSRASGNAIETGTGLSAGPSIDDPRKVISQSERGKADQTLDPTATSSSGGSGGSFARTCKQSAVPSRGQKRKTMDAEESECQSEDAELDSAVENKPAKRSGSTRRSRAAEVHNLSERRRRDRINEKMRALQELIPHCNKTDKASMLDEAIEYLKSLQLQLQVMWMGSGIVPVMFPGVQHFMSRMGMGMGMGPPPLPSMQNPMHLPRVPLVDQSISMAPTQNQAVICQTPVLNPVNYQNQMQNPTFSDQYARFMGFHMQAASQPMNMFRFGSQTVQQNQMMAPPNSGGGPLSAGTAASDAPPSGKTG

SEQ ID NO: 350 - DNA, 1524 bp, Solanum lycopersicum
atgatcttgaattggtttcaattggatggtcttttctgtagatttgatcatgagctagtggagttgttgtggcgaaacggggaggtagtattacatagccaaacacataaaaaacagccaggttatgatcctaatgaatgcagacagtttaacaaacatgatcaaccaacaataagagttgctggaaatcagactaatttgattcaagatgatgaaactgtcgcgtggctaaactgccctatcgatgattcgtttgacaaagaattttgttcccctttcttatctgatatttcaacaaatcctcacctgggggaggagcctgataagtcaattaggcaatcagaggacaataacaaggttttcaagtttgatcctttagagatcaaccatgttcttccgcaatcacatcattctggtttcgatccaaatccaatgccacctccaagatttcacaactttggatcagcgcaacagaaacatcatatagtagggggggatcagaaaggtgttaactttcctccaccgataaggtcatccaatgtgcagcttggtggcaaagaagctagaagcaatctgatgctgcaagatattaaagaggggtctgtgatgacagttggttcaagccactgtggcagcaatcaagttgatactagccggttttcaagtagtgcaaatagagggctgtctgcagcaatgatcactgattataccggaaaaatcagtccacaaagtgatacaatggaccgagacacatttgaaccagctaatacatcttcgtcttcaggaagatcgggtagtagttatgcaagagcatgcaatcaatctacagcgaccaatagccagggccacaaaaggaagagtagagatggtgaagaaccagaatgccagagtaaagctgatgagctagaatcagctggaggaaacaagtcagcccaaaaatctggaactgcccgaaggagccgtgctgcagaagtgcataatctctctgaaaggagacggagggatagaatcaatgagaaaatgaaggccttgcaagagcttcttcctcactctactaagacagacaaagcatcaatgctggatgaggctattgaatacttgaaatcacttcagatgcaactgcagatgatgtggatgggaagtggcatggcatcaatgatgttccctggtgtccaacactacatttccagaatgggaatggggatgggtccgccttcggtgccttccatgcacaatgctatgcatttagctaggcttcctttggttgatccagcaatccctttgacacaagctgcccctaataatcaagcagctgcaatgtgccagaattcaatgttgaatcaagttaactatcaacgccatttgcagaatcccaattttccagatcaatatgctagttacatggggttccatccacttcaaggcgcttctcagcctataaacatttttggcttaggttcacatacagcacagcaaactcagcagttaccgcatccaactaatagtaatgcacctgccacttga

SEQ ID NO: 351 - protein, 507 aa, Solanum lycopersicum
MILNWFQLDGLFCRFDHELVELLWRNGEVVLHSQTHKKQPGYDPNECRQFNKHDQPTIRVAGNQTNLIQDDETVAWLNCPIDDSFDKEFCSPFLSDISTNPHLGEEPDKSIRQSEDNNKVFKFDPLEINHVLPQSHHSGFDPNPMPPPRFHNFGSAQQKHHIVGGDQKGVNFPPPIRSSNVQLGGKEARSNLMLQDIKEGSVMTVGSSHCGSNQVDTSRFSSSANRGLSAAMITDYTGKISPQSDTMDRDTFEPANTSSSSGRSGSSYARACNQSTATNSQGHKRKSRDGEEPECQSKADELESAGGNKSAQKSGTARRSRAAEVHNLSERRRRDRINEKMKALQELLPHSTKTDKASMLDEAIEYLKSLQMQLQMMWMGSGMASMMFPGVQHYISRMGMGMGPPSVPSMHNAMHLARLPLVDPAIPLTQAAPNNQAAAMCQNSMLNQVNYQRHLQNPNFPDQYASYMGFHPLQGASQPINIFGLGSHTAQQTQQLPHPTNSNAPAT

SEQ ID NO: 352 - DNA, 1914 bp, Oryza sativa
atgtccgacggcaacgacttcgccgagctgctgtgggagaacggccaggcggtggtgcacgggaggaagaagcacccgcagccggccttcccgccgttcggcttcttcggtggcaccggcggtggcggcggcggcagcagtagtagagcccaggagaggcagcccggcggcatcgatgcgttcgccaaggtggggggcggcttcggcgccttgggcatggctccggcggtgcacgacttcgcttctggcttcggcgccaccacgcaggacaacggtgatgatgacaccgttccgtggatccattaccccataattgacgatgaagacgccgccgcccctgctgctctcgcagcagcggactatggctccgacttcttctccgagctccaggcggcggcggctgccgcggcggccgccgcgccgccgaccgatctcgcctctctgccagcctccaatcacaacggcgccaccaataacagaaatgctccggttgccaccaccaccaccagggaaccctccaaggaaagccacggcggcctgtcggttcccaccacccgagccgagccgcagccgcagccacagctcgccgcagccaagctgcctcggtcgagcggcagcggcggcggcgagggcgtgatgaacttctcgctcttctcccgcccggccgtcctggcgagggcgacgctggagagcgcgcagaggacgcagggcaccgacaataaggcgtccaatgtcaccgcgagcaaccgcgtcgagtcgacggtcgtgcagacggcgagcgggccaaggagcgcaccggcgttcgccgatcagagggcggcggcgtggccgccgcagccgaaggagatgccgttcgcgtccacggcagccgctcccatggccccggccgttaacctgcaccacgagatgggccgtgacagggcaggccgaaccatgcctgtccacaaaaccgaggcgaggaaggcacctgaggccacggtcgcgacatcgtcggtgtgctccggcaacggagctgggagtgacgagctgtggcgccagcagaagcggaagtgccaggcccaggcagagtgctcagctagccaagacgatgatcttgacgatgaacctggagtattgagaaaatctggaaccaggagcacgaaacgcagccgcacagctgaggttcacaatttatcagaaaggaggagaagggacaggatcaatgaaaagatgcgcgctctgcaagaactcattcccaactgcaacaagattgataaagcctcgatgctggatgaagctatagagtacctcaaaacccttcagcttcaagtacagatgatgtccatgggaactgggctgtgcattcctccaatgctattaccaacagccatgcagcacttgcaaattccaccgatggctcatttccctcatctcggcatgggattggggtacgggatgggcgtcttcgacatgagcaacactggagcacttcagatgccacccatgcctggtgctcactttccctgcccaatgatcccaggtgcgtcaccacaaggtcttgggatccctggcacaagcaccatgccaatgtttggggttcctgggcaaacaattccttcgtcagcgtctagtgtaccaccatttgcatctttggctggtcttcctgttaggccaagcggggtccctcaagtatcaggcgccatggctaacatggtgcaagaccagcaacaaggcatagcgaatcaacagcagcaatgtctgaacaaggaagctatacagggagcaaatccaggtgattcacaaatgcagatcatcatgcagggtgacaacgagaattttaggataccctcttcagcccaaacaaaaagcagtcaattttcagatggtaccggcaaggggaccaacgctagagagagagatggggctgaaacataa

SEQ ID NO: 353 - protein, 637 aa, Oryza sativa
MSDGNDFAELLWENGQAVVHGRKKHPQPAFPPFGFFGGTGGGGGGSSSRAQERQPGGIDAFAKVGGGFGALGMAPAVHDFASGFGATTQDNGDDDTVPWIHYPIIDDEDAAAPAALAAADYGSDFFSELQAAAAAAAAAAPPTDLASLPASNHNGATNNRNAPVATTTTREPSKESHGGLSVPTTRAEPQPQPQLAAAKLPRSSGSGGGEGVMNFSLFSRPAVLARATLESAQRTQGTDNKASNVTASNRVESTVVQTASGPRSAPAFADQRAAAWPPQPKEMPFASTAAAPMAPAVNLHHEMGRDRAGRTMPVHKTEARKAPEATVATSSVCSGNGAGSDELWRQQKRKCQAQAECSASQDDDLDDEPGVLRKSGTRSTKRSRTAEVHNLSERRRRDRINEKMRALQELIPNCNKIDKASMLDEAIEYLKTLQLQVQMMSMGTGLCIPPMLLPTAMQHLQIPPMAHFPHLGMGLGYGMGVFDMSNTGALQMPPMPGAHFPCPMIPGASPQGLGIPGTSTMPMFGVPGQTIPSSASSVPPFASLAGLPVRPSGVPQVSGAMANMVQDQQQGIANQQQQCLNKEAIQGANPGDSQMQIIMQGDNENFRIPSSAQTKSSQFSDGTGKGTNARERDGAET

SEQ ID NO: 354 - DNA, 2199 bp, Populus trichocarpa
atggctaaaggaaagattgatttttctcaagagaaggatcctagttgttcaactgatctgtcttttgtacctgagaatgactttggtgagctaatatgggaaaatggtcagattcaatccagtagagctagaaagatacaaccttgtagcaccttaccatgtcaaaaccccaagattcgatataaagacataggaaatggcaccgatattagaacaggaaagtttgggatgatggagtctacactgaatgaactcccgatgtcagttcccgctgttgaaatgggggtgaatcaagatgatgacatggtgccttggttgaattatccattggatgaatctcctcaacatgattattgttctgaatttttgcccgagttatctggtgttactgtaaatggacactcctcccagagtaattttccgtcgtttggtaaaaaaagttttagccagtcagttagggactcccgtactgtttctgtacataatggtttgagtttagagcaaggagatgtggcgaagaattcttcagcaggggatactgaagctaataggcctagaactagtgctagccagttatatctatcatcttctgagcattgccaaacatcatttccatattttagatccagagtttcagctaaaaatggtgatagtacaagcaatgctgcccaccatgtcgtttcagtggattctattcgagctccaacatcaggaggtggttttcccagcataaagatgcagaagcaagttccagcacaatccacaaccaactccagtttgatgaatttctctcattttgcaagacctgctgctcttgcgaaagctaatcttcagaacattggcatgagagctggtacagggatttcaaacatggaaagaacgcaaaataaagataagggctcaattgcaagtagtagcaatccggctgaatgcactcccattaattcatgtagtggtttgctaaaggaaacgagctcccattgtcttcctgttctgatgccacccaaggttgacgctaaaccatcagaggctaagcctgcagaaggatttgttcctgctgagctacctgaggctacaattccagaaggtgactcaaaaagtgatagaaactgtcgtcaaaacttttgtgaaagtgcaattaaaggagtagcagatgttgagaagactaaagagcccgtggttgcttcttcttctgttggctcggacaatagtgtggagagagcttcggatgatccaactgagaatctgaagagaaaacatcgagatactgaggagtctgaaggtcctagtgaagatgtagaagaagaatctgtaggtgcaaaaaaacaagctcctgctcgagcaggtaatggctccaagagaaaccgggctgcagaagttcataatttatctgaaaggaggcgaagggataggatcaacgaaaagatgcgggccctacaagaactcataccaaactgtaacaaggtggataaagcttcaatgcttgatgaggccattgagtatttaaagacgcttcagcttcaagtacagatcatgtcaatgggagctggattgtatatgccatcaatgatgttaccccctggaatgcctcacatgcatgcagctcatatggggcagttcttacccatgggtgtgggaatgggaatgcgtatgggaatgggaatgggttttgggatgagtatgccagacgtgaatggtggatcttctggttgccctatgtatcaagtgcctcctatgcatggaccgcatttctctggccagccaatgtcagggctaagtgctttgcataggatgggaggatcgaaccttcagatgtttggcctttcaggtcaaggatttccaatgtcatttccctgtgcacccttagtgccaatgtctggagggcctcctctgaaaacaaacatggaaccaaatgcttgtggtgtggtaggtgctacggataatttggattcagctacggcctgtagttcacatgaagcaattcagaaaatcaactcgcaagtgatgcagaataatgttgtcaatagctcaatgaatcagacctctagtcggtgccaggcaacaaatgaatgctttgaacaacctgctttggtgcaaaataatgatcaagactcaggagttgctgacaacagagcattgaagtcggttggtggaaatgacaatgtaccaagtagtgaggctggtgagcatttgcaataa

SEQ ID NO: 355 - protein, 732 aa, Populus trichocarpa
MAKGKIDFSQEKDPSCSTDLSFVPENDFGELIWENGQIQSSRARKIQPCSTLPCQNPKIRYKDIGNGTDIRTGKFGMMESTLNELPMSVPAVEMGVNQDDDMVPWLNYPLDESPQHDYCSEFLPELSGVTVNGHSSQSNFPSFGKKSFSQSVRDSRTVSVHNGLSLEQGDVAKNSSAGDTEANRPRTSASQLYLSSSEHCQTSFPYFRSRVSAKNGDSTSNAAHHVVSVDSIRAPTSGGGFPSIKMQKQVPAQSTTNSSLMNFSHFARPAALAKANLQNIGMRAGTGISNMERTQNKDKGSIASSSNPAECTPINSCSGLLKETSSHCLPVLMPPKVDAKPSEAKPAEGFVPAELPEATIPEGDSKSDRNCRQNFCESAIKGVADVEKTKEPVVASSSVGSDNSVERASDDPTENLKRKHRDTEESEGPSEDVEEESVGAKKQAPARAGNGSKRNRAAEVHNLSERRRRDRINEKMRALQELIPNCNKVDKASMLDEAIEYLKTLQLQVQIMSMGAGLYMPSMMLPPGMPHMHAAHMGQFLPMGVGMGMRMGMGMGFGMSMPDVNGGSSGCPMYQVPPMHGPHFSGQPMSGLSALHRMGGSNLQMFGLSGQGFPMSFPCAPLVPMSGGPPLKTNMEPNACGVVGATDNLDSATACSSHEAIQKINSQVMQNNVVNSSMNQTSSRCQATNECFEQPALVQNNDQDSGVADNRALKSVGGNDNVPSSEAGEHLQ

SEQ ID NO: 356 - DNA, 1269 bp, Zea mays
atggacggcaatgcgaggtcggcggcaacgaatcagaagaagcccgtcgtcgcggacgacgacctcgtggagctgctgtggcacaacgggagcgtcgtcgcgcagccccaggcgcaccagaggccggcgcccacctacgaccccgaccgcccgggcaccagcggcctcaccggcgaagagaccgccgcgtggttcccggacaccctcgacgacgcgctggagaaggacctgtacacgcagctctggtacagcaccatcgccgacgccgccccgcagcacgagggcacgctcccgggccctacctcgcagccttcgccttcgccgcccgttgggagcagcggcgtcgagtcgagctgggctggcgacatctgctcgaccttctgcggaagcaaccaggtgctcaggacgccggcaaggatcagggggaaggacgcggcattgcagtcggagttgccgagcaataccggcgcgcacgacggcacatcgtcatccggcgggtctggaagcaactatgggggattcgggctgcccagtgacagcgtccatgtacagaagaggaaggggaggtgtagagacgactcagatagtccgagtgaggatgccgagtgtgaggaggcaagtgaggaaacgaaaccatcaaggcgatatgggacgaaacgccggactcgtgcagctgaagttcacaatctttcagagaggagaagaagggaccggatcaatgaaaagatgcgcgcattgcaagagctcatcccgcattgcaacaagactgacaaagcgtcgatattagacgagacgattgagtatctgaagtccctccaaatgcaagttcagatcatgtggatgacttctgggatggcgccaatgatgtttcctggtgttcaccaattcattccacagatggctctaggaatgaatccaggttgcatccctgcagcacagggcctaagtcagatgccaagattaccatacatgaaccacaccctgccaaaccatatccatctgaactcgtctccagctatgaatctaatgaatccactgaacgccgcgaaccaggtgcaaatcggtcacctcagggatgcaagtagccacttgcttcacctagatggcgggcgagcagcagtggtacctcaggtaccaggaccaggaccccatgttcatggacatcaaatagcacaagccgaagaacacaataagatactggaagtggcagctagtactgttataccaacttctaaggcagggcaaccaccaactttacatagagtttag

SEQ ID NO: 357 - protein, 422 aa, Zea mays
MDGNARSAATNQKKPVVADDDLVELLWHNGSVVAQPQAHQRPAPTYDPDRPGTSGLTGEETAAWFPDTLDDALEKDLYTQLWYSTIADAAPQHEGTLPGPTSQPSPSPPVGSSGVESSWAGDICSTFCGSNQVLRTPARIRGKDAALQSELPSNTGAHDGTSSSGGSGSNYGGFGLPSDSVHVQKRKGRCRDDSDSPSEDAECEEASEETKPSRRYGTKRRTRAAEVHNLSERRRRDRINEKMRALQELIPHCNKTDKASILDETIEYLKSLQMQVQIMWMTSGMAPMMFPGVHQFIPQMALGMNPGCIPAAQGLSQMPRLPYMNHTLPNHIHLNSSPAMNLMNPLNAANQVQIGHLRDASSHLLHLDGGRAAVVPQVPGPGPHVHGHQIAQAEEHNKILEVAASTVIPTSKAGQPPTLHRV

SEQ ID NO: 358 - protein, 70 aa, Artificial sequence
  motif 7
  VARIANT (1)..(1): / replace = "Lys" / replace = "Gly"
  VARIANT (2)..(2): / replace = "Thr" / replace = "Gly"
  VARIANT (3)..(3): / replace = "Gly"
  VARIANT (4)..(4): / replace = "Ser"
  VARIANT (5)..(5): / replace = "Ala" / replace = "Ser"
  VARIANT (6)..(6): / replace = "Arg"
  VARIANT (8)..(8): / replace = "Ser"
  VARIANT (30)..(30): / replace = "Lys"
  VARIANT (38)..(38): / replace = "Asn" / replace = "Arg"
  VARIANT (42)..(42): / replace = "Ser"
  VARIANT (47)..(47): / replace = "Ile"
  VARIANT (60)..(60): / replace = "Met"
  VARIANT (62)..(62): / replace = "Leu"
  VARIANT (64)..(64): / replace = "Met"
  VARIANT (66)..(66): / replace = "Ser"
  VARIANT (69)..(69): / replace = "Gly" / replace = "Cys"
RSTTTKRRRAAEVHNLSERRRRDRINEKMRALQELIPHCNKTDKASMLDEAIEYLKSLQLQVQIMWMGSG

SEQ ID NO: 359 - protein, 18 aa, Artificial sequence
  motif 8
  VARIANT (1)..(1): / replace = "Ile"
  misc_feature (2)..(2): Xaa can be any naturally occurring amino acid
  VARIANT (3)..(3): / replace = "Glu"
  VARIANT (4)..(4): / replace = "Glu"
  VARIANT (5)..(5): / replace = "Asp"
  VARIANT (6)..(6): / replace = "Gly" / replace = "Asp"
  VARIANT (13)..(13): / replace = "Cys" / replace = "Glu"
  VARIANT (16)..(16): / replace = "His" / replace = "Gly"
LXPDNELVELLWQNGQVV

SEQ ID NO: 360 - protein, 13 aa, Artificial sequence
  motif 9
  VARIANT (1)..(1): / replace = "Asp" / replace = "Asn" / replace = "Gly"
  VARIANT (3)..(3): / replace = "Ile"
  VARIANT (6)..(6): / replace = "Gln"
  VARIANT (8)..(8): / replace = "Gln" / replace = "Lys" / replace = "Cys"
  VARIANT (9)..(9): / replace = "Asn"
  VARIANT (11)..(11): / replace = "Glu" / replace = "His"
ELVELLWRDGQVV

SEQ ID NO: 361 - protein, 7 aa, Artificial sequence
  motif 10
RAAEVHN

SEQ ID NO: 362 - protein, 11 aa, Artificial sequence
  motif 11
SERRRRDRINE

SEQ ID NO: 363 - protein, 27 aa, Artificial sequence
  motif 12
  VARIANT (6)..(6): / replace = "Ile"
  VARIANT (8)..(8): / replace = "Glu"
  VARIANT (12)..(12): / replace = "Asp"
  VARIANT (19)..(19): / replace = "Phe"
  VARIANT (23)..(23): / replace = "Val" / replace = "Leu"
TDKASMLDEAIEYLKSLQLQLQMMWMG

SEQ ID NO: 364 - DNA, 54 bp, Artificial sequence
  primer: prm12326
ggggacaagtttgtacaaaaaagcaggcttaaacaatgaaccagttcgtccctg

SEQ ID NO: 365 - DNA, 50 bp, Artificial sequence
  primer: prm12327
ggggaccactttgtacaagaaagctgggtcagaatgtcgtcaggagtcag

SEQ ID NO: 366 - DNA, 2194 bp, Oryza sativa; identical to SEQ ID NO: 289

SEQ ID NO: 367 - DNA, 1224 bp, Populus trichocarpa
atgaactctgcttctcttagcagtgcgtgcagttgcttaacatggagaacctcttcaatcgtgcccgtacagctagggtttaatcactctacaaaatataaatcttctccccgaagattccacatcgcctgctcatccgcctcctcttcttctgatccattgttggtaaaggctgcgaaaggagaaccagtaagtaggcctccggcatggatgatgcgtcaagcaggaaggtatatggctgtttacagaaagcttgcagagaaatatccatcctttagagagaggtcagagacgacagatctcattgtggaaatttctttgcagccttgggaagcttttcatcctgatggagttattattttctccgacatacttacacctctacctgcatttggtgtgccgtttgacatagaagaagtgaggggccctgttattcaatctccaattcgttctgaagaaggtttgaaggctttgcatccgattgaattagagaaacttcagtttgtgggagactcgcttaggatattgcgcaatgaggttgaggggcgtgctgcagttttgggttttgtaggagcaccttggacaatagctacctatatagtggaagggggtacaactcgtacatatacaaacataaagagcatgtgccatacagcaccacaagtgttaagggctctcctctcacatctgacaaaggcgatgtctgactacattgtttttcaagttgagtctggggctcattgcatacaaatatttgactcgtggggtggacagctacctcctgacatgtgggatcgttggtcaaagccatatattgaagagatagtcagtacagtcaggaataaatgccctgaaacgccattggttctttacatcaatggaaatggtggccttctagagcgtatgaagggaactggagtcgatgtgattgggctggactggactgtggatttggcagatggaaggaagcgtttggggagtgggatcagtgtacaaggaaatgtggaccctgcttacttattttcaccacttccagcattgactgatgaaattcaaagagttgtgagatgtgctgggccgaggggacatattcttaatcttgggcatggtgttcttgttggtacaccagaagaagctgttgcacacttttttgaagttgctagaagcttgaagtttactacacctcaaggccatgtggtggaagaaccaaaattggtagtttaa

SEQ ID NO: 368 - protein, 407 aa, Populus trichocarpa
MNSASLSSACSCLTWRTSSIVPVQLGFNHSTKYKSSPRRFHIACSSASSSSDPLLVKAAKGEPVSRPPAWMMRQAGRYMAVYRKLAEKYPSFRERSETTDLIVEISLQPWEAFHPDGVIIFSDILTPLPAFGVPFDIEEVRGPVIQSPIRSEEGLKALHPIELEKLQFVGDSLRILRNEVEGRAAVLGFVGAPWTIATYIVEGGTTRTYTNIKSMCHTAPQVLRALLSHLTKAMSDYIVFQVESGAHCIQIFDSWGGQLPPDMWDRWSKPYIEEIVSTVRNKCPETPLVLYINGNGGLLERMKGTGVDVIGLDWTVDLADGRKRLGSGISVQGNVDPAYLFSPLPALTDEIQRVVRCAGPRGHILNLGHGVLVGTPEEAVAHFFEVARSLKFTTPQGHVVEEPKLVV

SEQ ID NO: 369 - DNA, 1170 bp, Aureococcus anophagefferens
atgctcgcgctgctgtgctccctggccctgacgagctcgctcgtcgcgtccaaggtgagcgcgccgtcgccccggcgcgacgtgtcggcggccggtgcggcgacggacgacgcccccctgctgctgcgcgcggcgcgcggcgaggccgtggagcggacgcccgtgtggatgatgcgccaggccgggcgccacatgcaggtctaccgggacctcgtcaagaagtacccgacgttccgcgagcggagcgagatccccgaggccgcgctcgagatcagcctccagccgtgggaggcgtacggcgtcgacggcgtcatcctcttcagcgacattttgacgcccctgccggccatgggcgtcgacttccagatcagcgagggcggcgccatcgccatctcgcccatccgcacggaggcccacctcgcggagctgaaaaaggcgaatttcgacgcggcgacggcgtgccccttcgtcggcgaggtcctgggcaagctccgggacaaagtcgggtccagcgccacggtgctcggcttcgtcggcctccccttcacgctcgcgtcctacctcgtcgagggcaagacgggcacgacgtccgggttcgcggaggtggggaaaatgaggagcgagcagccggagctcctccacggcatcctcgacctcctcgcggagaacatcggcgcctacgcctgctaccaggtcgagtccggcgcccaggtcatccaggtcttcgactcctgggcgggccacctccccgaggaccagtacctcgaattcgccgtgccctaccaaaagaaggtcatcgaggccatcaaggccaagcacccggagacgcccgtcatcatctacatggcgccggacgtccactcgaaggacggcggcttcctcgaccacctcgcggcctccggcgcggactgcgtctccgtcgactacaccgtcgacttcggcgagacgcgcgcgaggctcccggccggagtggccatgcagggcaacctcgacccgaagatcctccgcgacgggcccctcgacaagatcaaggaggagacggagaagatcctcgccgcgggcaactgcaacatgcacatcatgaacctcggccacggcatcgaggccgacacgcccgagccgcacgcgaagttcttcgtggacacggtccaggcgttccgcgccaagtag

SEQ ID NO: 370 - protein, 389 aa, Aureococcus anophagefferens
MLALLCSLALTSSLVASKVSAPSPRRDVSAAGAATDDAPLLLRAARGEAVERTPVWMMRQAGRHMQVYRDLVKKYPTFRERSEIPEAALEISLQPWEAYGVDGVILFSDILTPLPAMGVDFQISEGGAIAISPIRTEAHLAELKKANFDAATACPFVGEVLGKLRDKVGSSATVLGFVGLPFTLASYLVEGKTGTTSGFAEVGKMRSEQPELLHGILDLLAENIGAYACYQVESGAQVIQVFDSWAGHLPEDQYLEFAVPYQKKVIEAIKAKHPETPVIIYMAPDVHSKDGGFLDHLAASGADCVSVDYTVDFGETRARLPAGVAMQGNLDPKILRDGPLDKIKEETEKILAAGNCNMHIMNLGHGIEADTPEPHAKFFVDTVQAFRAK

SEQ ID NO: 371 - DNA, 1185 bp, Arabidopsis thaliana
atgtcaatccttcaagtctctacttcgtctctttcttcttctactcttctctccatatctcccagaaaatctctctcatctaccaagtcatgccggatagttcgatgttccgtcgagggaactactgtaaccgagagaaaagtctcggcaaccagcgagccacttcttctgagagctgttaaaggtgaagttgttgatagacctccggtttggcttatgaggcaagctgggaggtacatgaagagttatcaaactctctgtgagaagtatccttctttcagagatagatcagagaatgcagatcttgtggtggaaatttctttgcagccatggaaggtgtttaagccagatggggtgattctgttctcagacattctcactccattgtctggaatgaacatacctttcgacattgttaaaggaaaaggtcctatcatctttaacccgcctcaatcagctgccgacgttgctcaagttagagaattcgtaccagaggaatctgttccttatgttggagaagcactcagaagattaagaaatgaggtgaacaatgaagccgctgttctgggatttgttggagctccatttacactttcttcgtatgtaatcgaaggtggctcatctaagaacttcacacagataaaaagattagctttttctcaacccaaggttctacatgccttactccagaagttcacaacctcgatgataacgtacatacgctatcaagcagatagcggagctcaagctgtgcaaatattcgactcttgggcaaccgagcttagcccggtggattttgaggagtttagcttaccttatctcaaacagattgtggaagctgtgaaacaaactcacccaaacctacctctcatactttatgctagtggatcaggaggtttgctagagagactggctcggaccggtgtggatgttgtgagcttggactggactgtggacatggctgaaggaagagaccggctaggaagagacatagcagttcaaggaaacgttgatccgggagttctatttggatcgaaagaatttatcacaagccggattcatgatactgtgaagaaagctgggagagataaacacattctcaacttggggcatggtattaaagttggaacccctgaagagaatgtagcacacttctttgaggttgctcaagaaattagatattaa

SEQ ID NO: 372 - protein, 394 aa, Arabidopsis thaliana
MSILQVSTSSLSSSTLLSISPRKSLSSTKSCRIVRCSVEGTTVTERKVSATSEPLLLRAVKGEVVDRPPVWLMRQAGRYMKSYQTLCEKYPSFRDRSENADLVVEISLQPWKVFKPDGVILFSDILTPLSGMNIPFDIVKGKGPIIFNPPQSAADVAQVREFVPEESVPYVGEALRRLRNEVNNEAAVLGFVGAPFTLSSYVIEGGSSKNFTQIKRLAFSQPKVLHALLQKFTTSMITYIRYQADSGAQAVQIFDSWATELSPVDFEEFSLPYLKQIVEAVKQTHPNLPLILYASGSGGLLERLARTGVDVVSLDWTVDMAEGRDRLGRDIAVQGNVDPGVLFGSKEFITSRIHDTVKKAGRDKHILNLGHGIKVGTPEENVAHFFEVAQEIRY

SEQ ID NO: 373 - DNA, 1257 bp, Arabidopsis thaliana
atgagcttatcatcgccaaccagtgcttgtagctcgtccagatgttactcctcgggattatcgtttccgattggatttggatcgaatcccatcaatgtgggattggtttgttacccaaaaagatacagtattgctgctcggaagttcgtagtggcttgctcctcctcctcttccgatccacttttggttaaggctgcaaaagggcaagccataagtcgtcctccagcttggatgatgaggcaagcaggaaggtatatggctgtttaccaaaagctcgccaagaaacatccgtccttcagagagagatcagagaacactgatctaatagtggaaatctctttgcagccttggcaagcattcagaccagacggtgtcatcattttctctgacatcctcacccctttacctgcattcggtgtcccttttgatattgaagaggtaaaaggtcctgtaatccaatctcctatccgaactgaagaagatatgaagagattacatcccattgatttcgagaaactacagtttgttggagattctctcaagattttgagacgagaggttggggaacatgctgcggtgttgggtttcgttggagcgccttggacaattgcaacatatattgttgaaggaggaacaactcgaacatatacagtcataaagaatatgtgccacactgcaccagatgtattgagagctctattatctcatttaaccaaggccattaccgagtatgtggtttaccaagttgagcacggagctcactgcatacaaatattcgattcctggggtggccaactgactccggagatgtgggagcgctggtccaaaccatacattgaagagatcatacatgctgtaaagaaaagatgtccagatacgccgatagttttctacatcaatggaaatggtggccttcttgagcgaatgaaaggaactggagctgatgttattggacttgactggactgtagatatggctgatggaaggaggcgattgggaagcgaggtaagtgtgcagggaaatgttgatccagcttacctattctctccgcttcctgctttgaccgaagaaattgaaagagttgtgaagtgtgctggaccaaaagggcatattctcaatctaggacacggtgtcttggtagggacaccagaggaagccgtggctcatttctttgaaaccgctagaaacttggattaccaaacacttttccaaaatcatgttcctgcagaaaaagctgaacctgaattggttgtctga

SEQ ID NO: 374 - protein, 418 aa, Arabidopsis thaliana
MSLSSPTSACSSSRCYSSGLSFPIGFGSNPINVGLVCYPKRYSIAARKFVVACSSSSSDPLLVKAAKGQAISRPPAWMMRQAGRYMAVYQKLAKKHPSFRERSENTDLIVEISLQPWQAFRPDGVIIFSDILTPLPAFGVPFDIEEVKGPVIQSPIRTEEDMKRLHPIDFEKLQFVGDSLKILRREVGEHAAVLGFVGAPWTIATYIVEGGTTRTYTVIKNMCHTAPDVLRALLSHLTKAITEYVVYQVEHGAHCIQIFDSWGGQLTPEMWERWSKPYIEEIIHAVKKRCPDTPIVFYINGNGGLLERMKGTGADVIGLDWTVDMADGRRRLGSEVSVQGNVDPAYLFSPLPALTEEIERVVKCAGPKGHILNLGHGVLVGTPEEAVAHFFETARNLDYQTLFQNHVPAEKAEPELVV

SEQ ID NO: 375 - DNA, 1257 bp, Arabidopsis thaliana; identical to SEQ ID NO: 373

SEQ ID NO: 376 - protein, 418 aa, Arabidopsis thaliana; identical to SEQ ID NO: 374

SEQ ID NO: 377 - DNA, 798 bp, Aquilegia sp.
atgacttctttctgcgctttaaccagtaactgtgggtcgattggttggagttcttcaagcttgtttgaacagagtgggtttgtcttttctcaaggaattagaagtggggtttgttctgctagaagttttaagaaaaacaaaattcccaaagcgagtctttctacctctgacccactcttggtaaaggctgcacgaggagatgtggttagccggcctccagcatggatgatgcgtcaagcaggaaggtatatggctgtttacagaaaacttgcagagaaacacccatccttcagagagagatcagagacaactgatctcattgtggaaatctctttgcagccttggagagcttttcaacctgatggggttattattttctctgacattcttacccctctaccagcattcggtgtgccatttgacatagaagaagtaaggggtcccgttattcagtctccaatttcttccgaggagggattaaaagcattgcatcctattgacttagaaaaagtttcttttgttggggaatccttgcgaatactgcgccaagaggttggagaacaagcagcaattttgggttttgtaggagcaccatggacgattgccacatacatagtggaggggggtactacgcgtacatatacaactattaagagaatgtgccatactgcgccacatgtattgaaggctcttctctctcatctaacgcaggcgatatcagagtatgttatatttcaagtgaattctggagctcatgcatacagatctttgattcatggggtggacaattgccactga

SEQ ID NO: 378 - protein, 265 aa, Aquilegia sp.
MTSFCALTSNCGSIGWSSSSLFEQSGFVFSQGIRSGVCSARSFKKNKIPKASLSTSDPLLVKAARGDVVSRPPAWMMRQAGRYMAVYRKLAEKHPSFRERSETTDLIVEISLQPWRAFQPDGVIIFSDILTPLPAFGVPFDIEEVRGPVIQSPISSEEGLKALHPIDLEKVSFVGESLRILRQEVGEQAAILGFVGAPWTIATYIVEGGTTRTYTTIKRMCHTAPHVLKALLSHLTQAISEYVIFQVNSGAHAYRSLIHGVDNCH

SEQ ID NO: 379 - DNA, 1242 bp, Aquilegia sp.
atgacttctttctgcgctttaaccagtaactgtgggtcgattggttggagttcttcaagcttgtttgaacagagtgggtttgtcttttctcaaggaattagaagtggggtttgttctgctagaagttttaagaaaaacaaaattcccaaagcgagtctttctacctctgacccactcttggtaaaggctgcacgaggagatgtggttagccggcctccagcatggatgatgcgtcaagcaggaaggtatatggctgtttacagaaaacttgcagagaaacacccatccttcagagagagatcagagacaactgatctcattgtggaaatctctttgcagccttggagagcttttcaacctgatggggttattattttctctgacattcttacccctctaccagcattcggtgtgccatttgacatagaagaagtaaggggtcccgttattcagtctccaatttcttccgaggagggattaaaagcattgcatcctattgacttagaaaaagtttcttttgttggggaatccttgcgaatactgcgccaagaggttggagaacaagcagcaattttgggttttgtaggagcaccatggacgattgccacatacatagtggaggggggtactacgcgtacatatacaactattaagagaatgtgccatactgcgccacatgtattgaaggctcttctctctcatctaacgcaggcgatatcagagtatgttatatttcaagtgaattctggagctcaatgcatacagatctttgattcatggggtggacaattgccacctgatatgtgggagaaatggtcgaaaccttacattgaagagattgtgagtgcagtaaaaaagaagtgccctcaaataccactggtcctctacatcaatggcaatggcggctttcttgaacgcatgaaaggaactggggttgatgtgattggactagattggactgttgatatggcagatgggaggcggcgattaggaaatgatatcagtatccaaggaaacgtagacccagcttatctattctcaacacttcctgccttgactaatgaaattcaaagggttgtgaaatccgcagggcagaggggacacattcttaatctggggcatggggtgcttgttgggacacctgaggaagctgttgctcacttttttgatgtagcaagaagtttgaagtatgatacttattctgaagattgctcaagggaaaaatcagaagtagcagtttaa

SEQ ID NO: 380 - protein, 413 aa, Aquilegia sp.
MTSFCALTSNCGSIGWSSSSLFEQSGFVFSQGIRSGVCSARSFKKNKIPKASLSTSDPLLVKAARGDVVSRPPAWMMRQAGRYMAVYRKLAEKHPSFRERSETTDLIVEISLQPWRAFQPDGVIIFSDILTPLPAFGVPFDIEEVRGPVIQSPISSEEGLKALHPIDLEKVSFVGESLRILRQEVGEQAAILGFVGAPWTIATYIVEGGTTRTYTTIKRMCHTAPHVLKALLSHLTQAISEYVIFQVNSGAQCIQIFDSWGGQLPPDMWEKWSKPYIEEIVSAVKKKCPQIPLVLYINGNGGFLERMKGTGVDVIGLDWTVDMADGRRRLGNDISIQGNVDPAYLFSTLPALTNEIQRVVKSAGQRGHILNLGHGVLVGTPEEAVAHFFDVARSLKYDTYSEDCSREKSEVAV

SEQ ID NO: 381 - DNA, 1176 bp, Brassica napus
atgtcaatccttcagctctctagctcttctctttccttcctctctccgagaaaacctctgccgtcttcgtcttcgaagtcttcccggtcaattcgctcttccctcgagggaaccactgtaaccgagcggaaagtgtctgcaaccaccgagcctcttcttctgagagctgtcaaaggtgaagttgttgacagacctccggtttggctcatgaggcaagctgggaggtacatgaagagttatcaaactctatgtgagaagtatccttctttccgggatagatcagagaatgcagaccttgtggtggagatttctctccagccctggaaggtgttcaagccagatggggtgattttgttctcagacattctcactcctttgtctggaatgaacattcctttcgacattgtcaaaggcaaaggtccaatcatcttcaacccgccgcagtcagctgctgatgtgagtcaagtcagagagttcattccagaggagtctgttccgtatgttggagaagcactcaagaggttaagaaacgaggtgggcaatgaagctgcggttcttggttttgttggagctccattcactctctcctcctatgttattgaaggtggctcatctaagaacttcacacagatcaaaagattagctttctctcaacccaaggttctacatgctttactccagaagttcacaacctcaatgatcacttacatacgctaccaagcagatagtggagctcaagctgtgcaaatctttgattcatgggccactgagcttagccctgtggatttcgaggagtttagcttaccttacctcaaacagattgtggaagctgtgaaacagactcacccaaacctacctttgatactatatgcaagtggatcaggaggtttgctagagagactggctaggaccggtgtggatgttgtgagcttggactggactgtggacatggctgaaggaagggacaggctgggaagagacatagcggttcaaggaaacgtggaccctggagttttgtttggatccaaagagtttatcacaagcaggattgaagatactgtgaagaaagctgggagagataagcacattctgaacctggggcatggtattaaagttggaactcctgaagagaacgttgcacacttctttgaggttgctcaagggattagatattaa

SEQ ID NO: 382 - protein, 391 aa, Brassica napus
MSILQLSSSSLSFLSPRKPLPSSSSKSSRSIRSSLEGTTVTERKVSATTEPLLLRAVKGEVVDRPPVWLMRQAGRYMKSYQTLCEKYPSFRDRSENADLVVEISLQPWKVFKPDGVILFSDILTPLSGMNIPFDIVKGKGPIIFNPPQSAADVSQVREFIPEESVPYVGEALKRLRNEVGNEAAVLGFVGAPFTLSSYVIEGGSSKNFTQIKRLAFSQPKVLHALLQKFTTSMITYIRYQADSGAQAVQIFDSWATELSPVDFEEFSLPYLKQIVEAVKQTHPNLPLILYASGSGGLLERLARTGVDVVSLDWTVDMAEGRDRLGRDIAVQGNVDPGVLFGSKEFITSRIEDTVKKAGRDKHILNLGHGIKVGTPEENVAHFFEVAQGIRY

SEQ ID NO: 383 - DNA, 1254 bp, Brassica napus
atgagtttatcatcaccaaccagtgcttgcagctcgtcgagatgttactcctcgggcttatcattgccgatagggttccgatcaagtcccatcaatgtaggattggtttcttacccaagaagacacactaacgctcctcggaagctcgtcatagcttcctcctcctcctcctcctcctcagatcctttattggttaaagctgctaaaggggaagcagtgtctcgcccgccagcgtggatgatgaggcaagcaggaaggtacatgtccgtctacaaaaagctagccctgaagcacccttccttcagagagagatcagagaacactgatctcatcgtcgaaatctccttgcagccttggcaagcttttaaacccgacggtgtcatcatcttctccgacatcctcactcccttacccgccttcggagtccctttcgacatcgaagaagtcaaaggccccgtgatccagtcccccatcagaaccgaagatgatctcaagaacctgcatcccattgatcttgataagcttcagttcgttggagactctctcaagatactgagacgagaggttggaggggacgctgctgtgttgggtttcgttggagcgccgtggacgatagcgacttatatagttgaaggagggacgactcggacgtatacggtgatcaagagtatgtgtcacactgcacctaatgtactgagagctcttttgtctcatttgactaaggctattacggagtatgttgtgtaccaagttgagcacggagctcactgcatacagatatttgattcttggggtgggcagttgactcctgagatgtgggagcgctggtccaaaccttacattgaagagatcattgatgctgtgaagagaagatgtccagacacgccgatagttttctacatcaatggaaacggcggccttcttgagcggatgaaaggaaccggagctgatgttattggactagactggactgtagatatggctgatggaaggaggagacttgggagcgatgttagcgtgcaggggaatgttgatccagctttcctattctctccgcttcctgctttaactgaagaaattcaaagagttgtgaagagtgctggaccaaaagggcatatactcaacctaggacatggtgtcttggtagggacaccagaggaagccgtggctcatttctttgaaaccgcaaggagcttggattacaaaacgtttttccaaaaccatgttcctgcagaatctgaactggttgcctga

SEQ ID NO: 384 - protein, 417 aa, Brassica napus
MSLSSPTSACSSSRCYSSGLSLPIGFRSSPINVGLVSYPRRHTNAPRKLVIASSSSSSSSDPLLVKAAKGEAVSRPPAWMMRQAGRYMSVYKKLALKHPSFRERSENTDLIVEISLQPWQAFKPDGVIIFSDILTPLPAFGVPFDIEEVKGPVIQSPIRTEDDLKNLHPIDLDKLQFVGDSLKILRREVGGDAAVLGFVGAPWTIATYIVEGGTTRTYTVIKSMCHTAPNVLRALLSHLTKAITEYVVYQVEHGAHCIQIFDSWGGQLTPEMWERWSKPYIEEIIDAVKRRCPDTPIVFYINGNGGLLERMKGTGADVIGLDWTVDMADGRRRLGSDVSVQGNVDPAFLFSPLPALTEEIQRVVKSAGPKGHILNLGHGVLVGTPEEAVAHFFETARSLDYKTFFQNHVPAESELVA

SEQ ID NO: 385 - DNA, 609 bp, Brassica napus
atgagtttatcatcaccaaccagtgcttgcagctcgtcgagatgttactcctcgggcttatcgttgccaatagggttccgatcaagtcccatcaatgtaggattggtttctcacccaagaagacacactaactctcctcggaagctcgtcatagcttcctcctcatcctcagatcctttattggttaaagctgctaaggggcaaccagtgactcgtcctccagcttggatgatgaggcaagcaggaaggtacatgtccgtctacaagaagctagccctgaagcacccttccttcagagagagatcagagaacactgatctcattgtggagatctctctgcagccttggcaagcttttaaaccagacggtgtcatcatattctccgacatcctcactcccttacccgccttcggcgtccctttcgacatcgaggaagtcaaaggccctgtgatccagtcccccatcagaaccgaagatgatctcaagaagctgcatcctattgatcttgagaaagcttcagttcgttggagactctctgaagattctgagacgagaggtgggggaagcatgctgctgtgttgggtttcgttggagcgccgtggacgatag

SEQ ID NO: 386 - protein, 202 aa, Brassica napus
MSLSSPTSACSSSRCYSSGLSLPIGFRSSPINVGLVSHPRRHTNSPRKLVIASSSSSDPLLVKAAKGQPVTRPPAWMMRQAGRYMSVYKKLALKHPSFRERSENTDLIVEISLQPWQAFKPDGVIIFSDILTPLPAFGVPFDIEEVKGPVIQSPIRTEDDLKKLHPIDLEKASVRWRLSEDSETRGGGSMLLCWVSLERRGR

SEQ ID NO: 387 - DNA, 1173 bp, Chlamydomonas reinhardtii
atgcagaccaaggctttcacctctgcgcgcccccagcgggccgctgcgctcaaggcgcagcgcacctcgtcggtgaccgtgcgcgcgaccgcggcccccgccgtggcctctgcccccgccgcctcgggctctgcctctgaccccctgatgctgcgcgccatccgcggcgacaaggtggagcgcccgcccgtgtggatgatgcgccaggccggccgctaccagaaggtgtaccaggacctgtgcaagaagcaccccacgttccgtgagcgctcggagcgcgtggacctggcggtggagatctctctgcagccgtggcacgcgttcaagcccgacggcgtcatcctgttcagcgacattctgacccccctgcccggcatgaacatccccttcgacatggcgcccggccccatcatcatggaccccatccgcaccatggcgcaagtggagaaggtgacgaagctggacgctgaggccgcctgccccttcgtgggcgagtcgctgcgccagctgcgcacctacatcggcaaccaggccgcggtcctgggcttcgtgggcgcccccttcaccctggccacctacattgtggagggcggcagctccaagaacttcgcgcacatcaagaagatggctttctccacccccgagatcctgcacgccctgctggacaagctggctgacaacgtggccgactacgtccgctaccaggccgacgccggcgcccaggtggtgcagatcttcgactcgtgggccagcgagctgcagccccaggacttcgacgtgttctccggcccctacatcaagaaggtgatcgacagcgtgcgcaagacccaccccgacctgcccatcatcctctacatcagcggctctggcggcctgctggagcgcatggcctcttgctcgcccgacatcatctcgctggaccagtcggtggacttcaccgacggcgtcaagcgctgcggcaccaacttcgccttccagggcaacatggaccccggcgtcctgttcggctccaaggacttcatcgagaagcgcgtcatggacaccatcaaggctgcccgcgacgccgacgtgcgccacgtgatgaacctgggccacggcgtgctgcccggcacccccgaggaccacgtgggccactacttccacgtcgcccgcaccgcccacgagcgcatgtaa

SEQ ID NO: 388 - protein, 390 aa, Chlamydomonas reinhardtii
MQTKAFTSARPQRAAALKAQRTSSVTVRATAAPAVASAPAASGSASDPLMLRAIRGDKVERPPVWMMRQAGRYQKVYQDLCKKHPTFRERSERVDLAVEISLQPWHAFKPDGVILFSDILTPLPGMNIPFDMAPGPIIMDPIRTMAQVEKVTKLDAEAACPFVGESLRQLRTYIGNQAAVLGFVGAPFTLATYIVEGGSSKNFAHIKKMAFSTPEILHALLDKLADNVADYVRYQADAGAQVVQIFDSWASELQPQDFDVFSGPYIKKVIDSVRKTHPDLPIILYISGSGGLLERMASCSPDIISLDQSVDFTDGVKRCGTNFAFQGNMDPGVLFGSKDFIEKRVMDTIKAARDADVRHVMNLGHGVLPGTPEDHVGHYFHVARTAHERM

SEQ ID NO: 389 - DNA, 1185 bp, Chlamydomonas reinhardtii
atgtctcaaaccatgaacaagagcgtcggtgcttcccgcagcgcagtccttcgccgcaacgcgttcaagcccattgctgtgggcatgtcgcgtgctcctgcagtggtctccaacgcgcagcccgcgtcggcaggcatcgtggagccgctcatggtccgcgctgctcgtggcgagaaggttgagcgcgcgccttgctggatgatgcgccaggctggccgctaccagaagtcataccgcgagctcgcgaagaagcacccttccttccgcgagcgctcggagaccacggagctgatcgtggagatcagtctgcagccctggaactccttcaagcccgatggagtcatcctgttcagcgacatcctcacgccgctgccgggcatcggcgtgaacttcgatatcgatgacaacaagggacccataatcgatacgccaatccgcactctggagcaggtcaagcagctgcacgccatggacttcagcaaggtcgacttcgtgggccgcgctctgactcagctgcgctccgaggtgaacaaccaggcggcggtgctgggcttcgtgggctcgccctggacgctggccacctacctgattgagggcggctccaccagcctgtataagaccatcaagaccatgtgcttctccgcgcccgaggtgctggatgcactgctgagcaagctggccgacgccatggccgagtacatcaagtaccagatccgcgccggcgcgcagtgcgtacagatcttcgattcctggggtgggcagctgccgccgcgcgagtgggagaagtggtcgggcccctacctgaagcgcatcatcgccagcgtgaaggccgagtaccccaccgtgccgctcacgctgtacgcgaacggcagtggtggcctgctggagcgcctggccaccaccggcgccgacgtgatcggcgtggattggaccaccgacatggcggacgcgcgccgccggataccgagcacccagtcggtgcagggcaacgtggaccccgccatcctgttcgcctcgcacgacgccatcgaggacgccgtgcgcgactgcctgcgcaaggggggcggccagcgccacatcctcaacctgggccacggcgtgctggtgggcacccccgaggagggcgtggcgcacatgttcgacctctcgaagcgcctcacgtacgccgacgtcgcgcagcactga

SEQ ID NO: 390 - protein, 394 aa, Chlamydomonas reinhardtii
MSQTMNKSVGASRSAVLRRNAFKPIAVGMSRAPAVVSNAQPASAGIVEPLMVRAARGEKVERAPCWMMRQAGRYQKSYRELAKKHPSFRERSETTELIVEISLQPWNSFKPDGVILFSDILTPLPGIGVNFDIDDNKGPIIDTPIRTLEQVKQLHAMDFSKVDFVGRALTQLRSEVNNQAAVLGFVGSPWTLATYLIEGGSTSLYKTIKTMCFSAPEVLDALLSKLADAMAEYIKYQIRAGAQCVQIFDSWGGQLPPREWEKWSGPYLKRIIASVKAEYPTVPLTLYANGSGGLLERLATTGADVIGVDWTTDMADARRRIPSTQSVQGNVDPAILFASHDAIEDAVRDCLRKGGGQRHILNLGHGVLVGTPEEGVAHMFDLSKRLTYADVAQH

SEQ ID NO: 391 - DNA, 1197 bp, Chlamydomonas reinhardtii
atgcagagctccctgacccgccactctgcggcttctcgcgcaagtcagcccttccagcagggccgcgctgccccgcgtagccgcgcctgctcggttgcctgccgcgctgctgctggtcaagatccgctacttctgcgtgtggcgcgtggtgaagatgcggagcgcacgccggtctggctgatgcggcaagcgggccggtacatggccgccttccgggagtactctgacaagtaccccttccgcatgcgctccgagactcccgaaatcgccattgagctgtcgcttcagccactgcgtgctttccgccccgacggcatcatcttcttctctgatatcctcacgcccctgcctggcatgggcattgagtttgacatggtcaagggcaagggccccgtcattgccaaccccatgcgctccactgagcacctcaagcagctcacgccgctgtcggaccccgcctcccggctgccgttcatcaacaccatcctgtccactctacgcaaggaggctgacagcaacggtgtgacgctgctgggctttatcggcacgccctggaccctggctgcctactccatggagggcaaggccgacaaggactgcaaggagaccaagaaaatcatgttccacaaccccgcgctactgcactcgttcctggacttcctgaccgagcagctcatcgtgtacgccggctaccagattgagagcggcgcgcaggtgatccagctgttcgacagctgggcgcaccacctgtcgccggctcagtttacggagttctcgctgccctacatggagcgcattactgtggcgctcaaggccaagtatccgcacgtgccggtcatcatgcacgccaacggcggaacgggcaagctggagctgatgcgcgagtcggccgcggatgtcatcggtctggactgggcggtggacatgaaggacgcgcgccagcagctggcgggcaagcgggtgcagggcaacgtggaccccatgtcgctgttcggccccgaggaggtcatccgcgccgaggtggagcgctgcctgcgtgccgccgggccacgcggccacatcctcaacgtggggcacggcgttgtgcagggtacgcccgagtcgtccgtggcgctcttctgccagctggcgcgcgagtcgggggccattcacgcaaaggctgccgccaacggcgcccgccagcccgtgctggtgtag

SEQ ID NO: 392 - protein, 398 aa, Chlamydomonas reinhardtii
MQSSLTRHSAASRASQPFQQGRAAPRSRACSVACRAAAGQDPLLLRVARGEDAERTPVWLMRQAGRYMAAFREYSDKYPFRMRSETPEIAIELSLQPLRAFRPDGIIFFSDILTPLPGMGIEFDMVKGKGPVIANPMRSTEHLKQLTPLSDPASRLPFINTILSTLRKEADSNGVTLLGFIGTPWTLAAYSMEGKADKDCKETKKIMFHNPALLHSFLDFLTEQLIVYAGYQIESGAQVIQLFDSWAHHLSPAQFTEFSLPYMERITVALKAKYPHVPVIMHANGGTGKLELMRESAADVIGLDWAVDMKDARQQLAGKRVQGNVDPMSLFGPEEVIRAEVERCLRAAGPRGHILNVGHGVVQGTPESSVALFCQLARESGAIHAKAAANGARQPVLV

SEQ ID NO: 393 - DNA, 1161 bp, Citrus sinensis
atgtcctgctcttcaatttcggctatttcaaattttccactgtattcctcttctcactccaactcaaactcccgatatgtccgctgcgccgtcggagggactgtagcggaaccgaaaaatgtttctgttgccgaacccatgttgctgaaagctgttcgaggagaagatgttgaaagacctccagtttggcttatgaggcaagcagggaggtacatgaagagttatcaaatcatctgcgagaagtatccttcatttcgtgaaagatcagaaaatgttgatcttgttgtggaaatttctcttcagccgtggcatgtttttaagccagatggtgtcattttattctcagacattttaactcctctttctgggatgaatataccttttgacattatcaagggtaagggtcctgtcatatttgatcctataaacacagatgcagaagttgaccaagtgagagaatttgatcctgaggagtcagttccatatgttgggaaagcattgacaatcttgcgagaagaggtaaacaatgaagcagcagttctgggttttgttggggctcctttcaccctggcgtcatatgtggttgagggtggttcatcgaagcacttcagcaaaataaagcgactagctttctctcaacccaaggtcctccatgcattgcttcggaaatttacaacctctatggcaaagtatgtacaataccaagctgacaatggagctcaagcagttcaaatcttcgattcatgggccacggagctcagtcctgttgattttgaagagtttagtctgccttacttgaagcaaattgtagacactgtgaaacaaacacatcctgatctctcattaatcctttatgccagtggatctggtggcttgcttgagaggctagctttgacaggtgtggatgttgttagcttggactggacagttgacatggctgaaggtagacggcgacttgggcccgacgttgcagttcaaggaaatgtcgatcctggtgcccttttcggttccaaggacttcatcaccaaccggataaatgataccgtgaggaaagcaggtagatggaaacatattttaaatcttggtcacggcattaaagtaggtacacctgaggaaaatgttgctcatttcttcgaagttgctaaagcaattagatactag

SEQ ID NO: 394 - protein, 386 aa, Citrus sinensis
MSCSSISAISNFPLYSSSHSNSNSRYVRCAVGGTVAEPKNVSVAEPMLLKAVRGEDVERPPVWLMRQAGRYMKSYQIICEKYPSFRERSENVDLVVEISLQPWHVFKPDGVILFSDILTPLSGMNIPFDIIKGKGPVIFDPINTDAEVDQVREFDPEESVPYVGKALTILREEVNNEAAVLGFVGAPFTLASYVVEGGSSKHFSKIKRLAFSQPKVLHALLRKFTTSMAKYVQYQADNGAQAVQIFDSWATELSPVDFEEFSLPYLKQIVDTVKQTHPDLSLILYASGSGGLLERLALTGVDVVSLDWTVDMAEGRRRLGPDVAVQGNVDPGALFGSKDFITNRINDTVRKAGRWKHILNLGHGIKVGTPEENVAHFFEVAKAIRY

SEQ ID NO: 395 - DNA, 1242 bp, Chlorella vulgaris
atgcagacacagttgcatgcccagtttcagggcataacaagcacatttacgacgagaagaccgtcatgttgccacacatcaagacgtctgaacgcccacaacatcgtgcgttgttcggcagaggatcctttgctactaagggtggctaggggagaagatgcagaaaggacacctgtctggctgatgaggcaagcaggcagatacatggcggaatttaggaagtactcagaccgcttgcccttcagggaaaggtctgagaacgcagagatagccacagagctatcgctgcagccctggagggctttccagccagacggggtcatcatgttcagcgacatcctgaccccactccctgtgctgggcatagaattcgacattgtgaggggcaagggaccagccatctccattcccatcagaaccatggagcaagtgagggcgctgcggccgatggaggacccagacagcagcctgcccttcatcaggcagatcctcacaaacctgcgctcggaggtgggcaatgcctccacagtgctcggctttgtcggcgccccttggaccctggcagcctactccatggagggcaccttccaaaagcagtgcatggccacgaagaagatcatgacagcgcagcctgctgtgctgcacgcgcttctggaccacctgactgaggccctcatagtctatgtctgccatcagattgacagcggggcacaggtggtgcaactatttgactcctgggcaggcctgctgtcgccagcgcagtttgcagagttcagcctgccctatgcgcagcgcgtgatcgatggtgtgcgcgcccagcggccggacacacccctcatcttccacgccaatggaggcacggggaagctggacaaggtggcgcagtgcagcgcggatgtgattggcctggactggcacacagacatggccgacgcgcgccggcagctgggcgcagggcgtgtgctgcagggcaacatggaccccatgctgctgtttgctccacaggacgttctgcggagagaggtgaccaaggtgctgcacgccgcgggccccaggaagcacatcctgaacgtagggcatggagtggctcagggaactcccgaggagaacgtgggtctcttctgcgagctggcacggcagtctgccagcattcatgcccaagcagagatctccctcacagacgaggacatgcaggctttgaataggctggggcaaagtgaagttggccttgtggggtgctga

SEQ ID NO: 396 - protein, 413 aa, Chlorella vulgaris
MQTQLHAQFQGITSTFTTRRPSCCHTSRRLNAHNIVRCSAEDPLLLRVARGEDAERTPVWLMRQAGRYMAEFRKYSDRLPFRERSENAEIATELSLQPWRAFQPDGVIMFSDILTPLPVLGIEFDIVRGKGPAISIPIRTMEQVRALRPMEDPDSSLPFIRQILTNLRSEVGNASTVLGFVGAPWTLAAYSMEGTFQKQCMATKKIMTAQPAVLHALLDHLTEALIVYVCHQIDSGAQVVQLFDSWAGLLSPAQFAEFSLPYAQRVIDGVRAQRPDTPLIFHANGGTGKLDKVAQCSADVIGLDWHTDMADARRQLGAGRVLQGNMDPMLLFAPQDVLRREVTKVLHAAGPRKHILNVGHGVAQGTPEENVGLFCELARQSASIHAQAEISLTDEDMQALNRLGQSEVGLVGC

SEQ ID NO: 397 - DNA, 1077 bp, Chlorella vulgaris
atggatggccaagattcttggaaggcccaaagcggcacacaggagcccctgctgctgcaagccttgaatggagtaccagtgcacaggccgcctgtgtggatgatgcgccaggcaggccgctacatgaaggtgtaccaggacctgtgcaagaagcaccccaccttcagggaacgatcagagaacacagaccttgcggtggaggtgtccctgcagccttggagggccttcaagccggacggagtcatcctgttctcggacatcctgacccccctcacgggcatgaacatcccctttgacatcgacactggcaggggacccatcatccacgaccccatccgcaccatggagcaagtgaaccaggtgacgaggttagaggccgaggaggcaacgccctacgtcggggaggcgctgcgggcgctacgggccgaggtcggcaacgaggctgcagtgctcgggtttgtgggcgcgccgttcacgctggcgtcgtacatagtggagggaggctccagcaagaactacacccacatcaagcgcctggcattcacgcagccggccgtgctgcatgcgctgctcagcaagctggccgacaacgtggccgactacatccgctaccaggcggatgcaggggcacaggtggtgcagatctttgactcgtgggcttcgcagctttcgcctcaggactttgaggtcttctccgctccctacatcaagcagatcatcgccgacgtgcgcaagacgcacccgcagctgaagctgatcctgtacatcagcggcagcgggggcctgctggagcgcatggctgcctgccagccggacatcatgtccatcgatcagcacgtcgacctccgcgatgccatcgcgcgcatcggcccagacttcgccgtccagggcaacatggaccccggcgtgctgttcggctccagggatgtgattgagcagcggatactggacaccgtgcgcgccgcgcagggcacccgccacgtcatgaacctgggccacggtgtccttgtgggaacgcctgaagactccgtcgcacacttcttcgaggtggcacgcaccgtgcacgagcggttgtga

SEQ ID NO: 398 - protein, 358 aa, Chlorella vulgaris
MDGQDSWKAQSGTQEPLLLQALNGVPVHRPPVWMMRQAGRYMKVYQDLCKKHPTFRERSENTDLAVEVSLQPWRAFKPDGVILFSDILTPLTGMNIPFDIDTGRGPIIHDPIRTMEQVNQVTRLEAEEATPYVGEALRALRAEVGNEAAVLGFVGAPFTLASYIVEGGSSKNYTHIKRLAFTQPAVLHALLSKLADNVADYIRYQADAGAQVVQIFDSWASQLSPQDFEVFSAPYIKQIIADVRKTHPQLKLILYISGSGGLLERMAACQPDIMSIDQHVDLRDAIARIGPDFAVQGNMDPGVLFGSRDVIEQRILDTVRAAQGTRHVMNLGHGVLVGTPEDSVAHFFEVARTVHERL

SEQ ID NO: 399 - DNA, 927 bp, Chlorella vulgaris
atgatgcgtcaggccggtagatatcaacttaccctgtctgagcggacggacctgattgttgagatcagtctacagccttggcattcctttcggccagatggtgtcatcctgttcagcgatatcctgacacctcttgcagccctgggcgtgccctttgaaattgatgatcacaagggtcccatcatagagaatcctataagcacgattgagcaggtgaaccagttgcatgatttggacttggaacgcttgcactttgtgggtgaatcattgactctcctgcgacaagaaacacagggtcaggctgcagtgttggggtttgtgggcagcccatggaccctggcaacgtacatcatagaggggaagagctccatccactataagaccatcaaaacgatgctgtacaaggcgccagaggtacttgatgcactcttgagccacttggcagatcagatcgccacctacattggattccagatcagctctggggcccacgctgtgcagctctttgactcctggggcggccagctaccacctcacctttgggacaggtggtcgcggccgtacattgagcgcatcgtgcagagagtgaaggcagagcatcccagcgtgcccatcacactgtatgccaatggcagtggagggctgctggagcgtctgggcagcactggtgtggacgtggtgggcctggactggaccatagacatggctgatgccaggaggcggctgggccctgatgtctcagtgcagggcaatgtggatccagcggtgttgtttgcgtctgaggatgccatagaggcggcagtcaaggactgcattgcaaaggcggggcagaaggggcacatcttgaatcttggccatggagttcttgtgggcacgccggaggagagcgtggcacacatgttcaacctgtccaagtccttggtataa

SEQ ID NO: 400 - protein, 308 aa, Chlorella vulgaris
MMRQAGRYQLTLSERTDLIVEISLQPWHSFRPDGVILFSDILTPLAALGVPFEIDDHKGPIIENPISTIEQVNQLHDLDLERLHFVGESLTLLRQETQGQAAVLGFVGSPWTLATYIIEGKSSIHYKTIKTMLYKAPEVLDALLSHLADQIATYIGFQISSGAHAVQLFDSWGGQLPPHLWDRWSRPYIERIVQRVKAEHPSVPITLYANGSGGLLERLGSTGVDVVGLDWTIDMADARRRLGPDVSVQGNVDPAVLFASEDAIEAAVKDCIAKAGQKGHILNLGHGVLVGTPEESVAHMFNLSKSLV

SEQ ID NO: 401 - DNA, 1191 bp, Chlorella sp.
atgcaggcagcaatgttcagccaggccgccacggccgccttcaagcccgctctgaagaccagggcggcgcgccggaacgcggtgcaggtgcatgctgtggcctcggtggagcagtctgcgggcgcagcagccaaggcgtctggggaggagccgctgctgctgcgggcgctgcggggcgaggaggtggagcgcccgccggtgtggatgatgcgccaggccgggcggtacatgaaggtgtaccaggagctgtgcaagaagcacaccaccttccgcgagcgctcggagaacgccgacatcgccgtggaggtgtcgctgcagccgtggcgcgcgttccagcccgacggcgtcatcctcttctccgacatcctcacccccatcgccggcatgaacatcccctttgacatcgacaagggcaagggccccgtcatcgcagaccccatccgcaccatggaggctgtggacagggtcaccccgctggtgcctgaggactgcgtgccgtttgtgggccaggcgctgcgccgcctgcgcgccgaggtcggcggcgcgtccaccgtgctgggctttgtcggcgcccccttcaccctggcaacatacattgtggagggcggcatgagcaagaactatgtgcagatcaagaagctgatgttcacggagcccgaggtgctgcacgcgctgctgcagaagctggccgacgcggtggtcacctacattaagtaccagcacgacaacggcgcgcaggtggtgcagatcttcgactcctgggcggcgcagctgagcccccaggactttgacatttggtgcgggccctacatcaagtacatcatcgccgaggccaagaagcaatgccccgacctgcccatcatcctctacatttccaacagcggggccctggtggagcgcatggcggcatgcaacccagacatcatctccctctgccacacggtggacatgaaggagggcatccgccgcgcgggcacccagtttgcctaccagggcaacatggacagcggcgtgctgtttggcagccacgacatgattgagcagcgggtgcgggagacggccaaggcggccaaggagatgggcgtgcggcacatcatgaacctgggccacggcatcatgcagggcaccccggaggagaatgcggcccacttcttcaaggttgccaaggagctgcgctatgccgacctctga

SEQ ID NO: 402 - protein, 396 aa, Chlorella sp.
MQAAMFSQAATAAFKPALKTRAARRNAVQVHAVASVEQSAGAAAKASGEEPLLLRALRGEEVERPPVWMMRQAGRYMKVYQELCKKHTTFRERSENADIAVEVSLQPWRAFQPDGVILFSDILTPIAGMNIPFDIDKGKGPVIADPIRTMEAVDRVTPLVPEDCVPFVGQALRRLRAEVGGASTVLGFVGAPFTLATYIVEGGMSKNYVQIKKLMFTEPEVLHALLQKLADAVVTYIKYQHDNGAQVVQIFDSWAAQLSPQDFDIWCGPYIKYIIAEAKKQCPDLPIILYISNSGALVERMAACNPDIISLCHTVDMKEGIRRAGTQFAYQGNMDSGVLFGSHDMIEQRVRETAKAAKEMGVRHIMNLGHGIMQGTPEENAAHFFKVAKELRYADL

SEQ ID NO: 403 - DNA, 1044 bp, Chlorella sp.
atggtgcgtgctgctcgcggcgaggccattgagcgggcgccatgctggatgatgcggcaggcggggcggtaccagaaggcgtaccgtgaccttgccctcaagcacccctccttccgcgagcgctccgagaacacagacctgattgtggagatcagcctgcagccctggcagtcgttcacgccggatggcgtcatcatcttcagcgacatcctgacgccgctgcccgcctttggcatcccgtttgagattgacgacaacaaggggccgctgctggacaaccccatccgcagcacggagcagctcaagcagctgcacgccatcgacctgcagcagctgagctttgtgggggagagcctggggctgatccgccaggaggtggcggggcgggccgctgtgctgggctttgtgggctgcccctggacgctggccacgtacgtggtggagggcgcctcctcctccatctacaaaaacatcaagaccatgatgttcaacgagccgcagctgctggactccctgctgagccacatcgccgaccagattgccgagtacgtgaagttccagattgacagcggcgccgactgcatcatgatgtttgactcgtggggcggccagctgccgcccaagcagtgggaccgctggtcgcgcccctacgtcgagcgcatcgtgcggcaggtgaaggccacgcacccgcgcacgccgctcacgctgtacgccaacggcagcggcggcatgctggagcgcatggggcagacgggcgcggacgtcatcgggctggactggacggtggacatggcagacgcgcggcggcggctgggcgcaggcgtggcggtgcagggcaatgtggacccggtggttctatttgggtctgaggctgccattgaggaggcggtgcgcgactgcctgaccaaggcgggcgagggcggccacatcctcaacctgggccacggcgtgctggtgggcaccccggaggagtcggtggccttcatgtttgacctctcgaagaagctcacttacagctccaacaagacgcccgccgcagtctga

SEQ ID NO: 404 - protein, 347 aa, Chlorella sp.
MVRAARGEAIERAPCWMMRQAGRYQKAYRDLALKHPSFRERSENTDLIVEISLQPWQSFTPDGVIIFSDILTPLPAFGIPFEIDDNKGPLLDNPIRSTEQLKQLHAIDLQQLSFVGESLGLIRQEVAGRAAVLGFVGCPWTLATYVVEGASSSIYKNIKTMMFNEPQLLDSLLSHIADQIAEYVKFQIDSGADCIMMFDSWGGQLPPKQWDRWSRPYVERIVRQVKATHPRTPLTLYANGSGGMLERMGQTGADVIGLDWTVDMADARRRLGAGVAVQGNVDPVVLFGSEAAIEEAVRDCLTKAGEGGHILNLGHGVLVGTPEESVAFMFDLSKKLTYSSNKTPAAV

SEQ ID NO: 405 - DNA, 792 bp, Euphorbia esula
atgaatctctcgttcgatattgttaaaggcaagggccccgttatattcaatcccctacgaacttctgacgatgttaagcaagttagggaattcattcccgaggagtctgttccatatgttggagaatcattgacaatcctgaggaaagaggtagataatcaagcggctgtacttggtttcgttggggcaccgttcactctagcatcatattgtgtagaaggaggttcatcgaaacacttctcgaaaataaaaaaattagctttctccgaaccccaggtcctacacgcattgctccaaaaattcgctacctccatggcaaaatacgtccaatatcaagccgataaaggcgctcaagccgtccaaatcttcgactcgtgggccacggaacttagtccggttgattttgaggagttcagtcttccatacctaaaacaaattgtggataccgtgaaagtaacccatccgaatctccctttaatcctttatgcaagcgggtccgggggattgcttgagaggctagctttgactggtgtagatgtggttagcttggattggaccgttgacatggcggaaggtaggaggcgattgggacccgatttggcggttcaggggaatgtagatccgggcgttcttttcgggtcgaaagagtttatcactaatcggattaatgatgttgtccgaaaagccgggaaagggaagcatatattgaaccttggtcatggaattgttgtaggcacaccagaggaaaatgttgctcatttttttgaggttgctaaagcaattagatactag

SEQ ID NO: 406 - protein, 263 aa, Euphorbia esula
MNLSFDIVKGKGPVIFNPLRTSDDVKQVREFIPEESVPYVGESLTILRKEVDNQAAVLGFVGAPFTLASYCVEGGSSKHFSKIKKLAFSEPQVLHALLQKFATSMAKYVQYQADKGAQAVQIFDSWATELSPVDFEEFSLPYLKQIVDTVKVTHPNLPLILYASGSGGLLERLALTGVDVVSLDWTVDMAEGRRRLGPDLAVQGNVDPGVLFGSKEFITNRINDVVRKAGKGKHILNLGHGIVVGTPEENVAHFFEVAKAIRY

SEQ ID NO: 407 - DNA, 1170 bp, Emiliania huxleyi
atgctcctcgccaccgctgccaccgcgctcagcgtgcgcatgtcggccgcgcccgcgccggcgagcgcctctgcctcctcgacttcgggcgccgccgacgcgccgctgctgctgcgagcggcgcgaggcgaggtcaccgagtcgacgccagtgtggatgatgcggcaggcgggcaggcacatgcaggtgtaccgcgacctggtgaaggactacccgacgtttcgcgagcgctccgagattcccgacgtctcgtatgccgtctcgatgcagccgcgcgacgcctatggcaccgacggagtgattttgttctccgacatcctcacgcctctgcctgcaatgggcgtcgactttgcgatctccgagggcggagggatcacgatcgacccgatccgcacgcgcgaggccttcgccaagatgaccgccgtccccttcgagcccgagacgaagatcagctttgtcggcgacgtgctcaagcggctgcgcgcgacgttggccggcaccgacgcgacggtgctcgggttcgtcggcctcccgttcacgctgggcacgtacctcatcgagggcgccaccggcacgaagacaggcttcgccgcgatgaggcagctccgagagtccgacccgcaactcgtggccgacatgctcaagctgctcggcgaccggatcgcgcagtacgcaatctaccagatcgactctggcgcgcaggtggtccaagtcttcgactcgtgggcgggccacctcacgccggacgagtttgacgagtgggcggcccccttccagcggcaagtcgttggcgccatcaaggctgcgcggcccgatacgcccgtaatcatctacatggcccccgacacccactccaaggagggggcgcttatcaccaagctcgcggcctcgggcgcaaacgtcgtctcggtcgaccacaccctcccgatctccgcggcgcgcgagctgctcgacgaggccggctacgagtcggtcggcttgcagggcaacctcgaccccgccatcctcgccgaggggtcggaggaggagatcgtcgccgccgcgcaggacatcctcaagaagatggctggtcggccgcacatcatgaacctcggccacggcatcgagccgaccacccccgagccgtcggccaacctctttgtcaagacggtccaggagtggcgcaactga

SEQ ID NO: 408 - protein, 389 aa, Emiliania huxleyi
MLLATAATALSVRMSAAPAPASASASSTSGAADAPLLLRAARGEVTESTPVWMMRQAGRHMQVYRDLVKDYPTFRERSEIPDVSYAVSMQPRDAYGTDGVILFSDILTPLPAMGVDFAISEGGGITIDPIRTREAFAKMTAVPFEPETKISFVGDVLKRLRATLAGTDATVLGFVGLPFTLGTYLIEGATGTKTGFAAMRQLRESDPQLVADMLKLLGDRIAQYAIYQIDSGAQVVQVFDSWAGHLTPDEFDEWAAPFQRQVVGAIKAARPDTPVIIYMAPDTHSKEGALITKLAASGANVVSVDHTLPISAARELLDEAGYESVGLQGNLDPAILAEGSEEEIVAAAQDILKKMAGRPHIMNLGHGIEPTTPEPSANLFVKTVQEWRN

SEQ ID NO: 409 - DNA, 1230 bp, Emiliania huxleyi
atgcacctcttggcgatcccgtgcttcgctcctggcgtctcgctcgcccctggcgtgcagcacggcgccgcggccggcgccgcgagccgcgccggcgcgccggtgctgcaggcgaccgagctgcgcatcgagaccccgccgggcggcgcggccgagctgctgcgtgcggctccgaactggacgccggcgccgggcgagcacgacatcctgctccgcgcggcgcgcggcgaggcggtggagcgcacgccggtgtggctcatgcggcaggcgggccgctacatggccgccttccgcgagtactccacaaagtaccccttccgtatgcggagcgagacgcccgaggtcgccatcgagctgtcgctgcagccgtggcgcgcgttcggcgtggacggcgtggtgatgttttcggacatactgacgccgctgcccgccatgggcgtcgatttcgacgtcgtccgcggcaccggccccgtcatcccgcagccgctccgcaccgccgccgacgtcgccgcgctgacgccgatcgacgactttgaatcgaagctcggcttcatccgcacgatcctgggctcgctgcgcaaggagacggagggcgggtgcacgctcatcggctttgtcggctcgcccttcaccctcgtcgcctacgccgtcgagggccaggccaaccgccactgcatctcgacgaaacagatgatgacggccgcgcccgaggtgctgcacgccgcgctcgaccacttcgccaccgagattggaaagtacggctgccaccagatcgagtgcggcgctcagaccatccagttcttcgagtcgtgggcgcaccacctcggagccggccagtttgacaccttcgccaagccgtacgcagacaaggcgatgcgatacatcaaggagcgccacccggacgtgccgatcatctactatgccaacggcgggtcgccgtacctcgagctgcagcgcgacatggcggcggacatgatccagctcgattggggcaccgacatggccaccgcgaggcgccgcctcgggacggagcgccgcgtggccggcaacgtcgacccgactgtcctgtttggctcggaggcgcagatcacggcggcggtgcaccaaaacatacgcgacgcgggcggcaaggggcagcacctcctcaacctcggccacggagtgctgcagggcacgcccgaggcgtccgtggcggcgtttgtcaacgccgcaaagtcgttctcggagtga

SEQ ID NO: 410 - protein, 409 aa, Emiliania huxleyi
MHLLAIPCFAPGVSLAPGVQHGAAAGAASRAGAPVLQATELRIETPPGGAAELLRAAPNWTPAPGEHDILLRAARGEAVERTPVWLMRQAGRYMAAFREYSTKYPFRMRSETPEVAIELSLQPWRAFGVDGVVMFSDILTPLPAMGVDFDVVRGTGPVIPQPLRTAADVAALTPIDDFESKLGFIRTILGSLRKETEGGCTLIGFVGSPFTLVAYAVEGQANRHCISTKQMMTAAPEVLHAALDHFATEIGKYGCHQIECGAQTIQFFESWAHHLGAGQFDTFAKPYADKAMRYIKERHPDVPIIYYANGGSPYLELQRDMAADMIQLDWGTDMATARRRLGTERRVAGNVDPTVLFGSEAQITAAVHQNIRDAGGKGQHLLNLGHGVLQGTPEASVAAFVNAAKSFSE

SEQ ID NO: 411 - DNA, 1164 bp, Gossypium hirsutum
atgtcttgtacctcagtttcttcttttactgcttctctctttgtcccttcaaaaagttcatctttttccaatcataagcgcagattcatccaatgttctcttggtggggctgtagtagaaccaaaagctttagcagaacccctgttgctcaatgctgttcgagggcaagatgttgaaagaccaccagtttggcttatgaggcaagcagggaggtacatgaagagctatcaaataatatgtgaaaaatatccttcctttcgtgaaagatcggaaaatgttgatcttgtcgttgagatttccctgcagccatggaatgttttcaagccagatggggtcattttattctccgatattctcactcctctctcagggatgaacatacctttcgacattatcaagggtaaaggtccagttatctttgaccctatagccactgctgctgatgttgatcaagtgagagaatttagtcccgaggggtcagttccatatgttggtgaagcattgacaatcttgaagaaagaggtagataacaaagctgcagtattgggttttgttggcgctccattcactctagcatcatatgtggttgaaggtggttcatcgaagaacttcacaaaaataaaaaaattggccttctctcaacccaaggtacttcattctttgcttcagaaatttgcgacctccatgacaaagtatattcggtaccaagctgacaatggagcccaagctgttcaaatatttgactcttgggcaacggagctaagtccggtggattttgaggagttcagcctgccgtatttgaagcaaattgtagatgctgtaaaacaaacccatccggatcttcctctaatcctttatgcaagtggatctgggggcttgcttgaaaggctagctttaacaggtgtggatgtagttagcttagattggactgttgacatggctgaaggtagaagacgacttggacacgatattgctgtccagggaaacgttgatcctggagttctgttcggttcaaaggacttcatcaccaatcggatacatgatactgtgacaaaagctggtaaagggaaacatatattgaatctcggtcatgggattaaagtaggtacccctgaagaaaatgttgcccatttctttgaggttgctaaagcaatcaggtactaa

SEQ ID NO: 412 - protein, 387 aa, Gossypium hirsutum
MSCTSVSSFTASLFVPSKSSSFSNHKRRFIQCSLGGAVVEPKALAEPLLLNAVRGQDVERPPVWLMRQAGRYMKSYQIICEKYPSFRERSENVDLVVEISLQPWNVFKPDGVILFSDILTPLSGMNIPFDIIKGKGPVIFDPIATAADVDQVREFSPEGSVPYVGEALTILKKEVDNKAAVLGFVGAPFTLASYVVEGGSSKNFTKIKKLAFSQPKVLHSLLQKFATSMTKYIRYQADNGAQAVQIFDSWATELSPVDFEEFSLPYLKQIVDAVKQTHPDLPLILYASGSGGLLERLALTGVDVVSLDWTVDMAEGRRRLGHDIAVQGNVDPGVLFGSKDFITNRIHDTVTKAGKGKHILNLGHGIKVGTPEENVAHFFEVAKAIRY

SEQ ID NO: 413 - DNA, 1164 bp, Glycine max
atgctttgcgtcaacactgccttcacctctttcttacccagaaaatcaacttgcgtcttttcctccaaatcaaccaccccaatttcctgcaccctccaaggaacagttgcagagccaaaatctacagctgctgctgaaccgcttttgctaaatgcagttcgcgggatagatgttgaaagacccccggtttggctcatgaggcaagcagggaggtacatgaagagttaccaaaccatctgtgagaaatatccttcattccgtgaaagatctgaaaatgttgatctcgtggtggaaatttctctgcaaccgtggcatgttttcaagcctgatggagtgattttattctcagacattcttaccccactttctggaatgaatataccctttgatattgtgaagggtaagggtcctgttatatttgatcctattcacacatctgcccaggttgatcaagtgaaggagtttattcctgaagaatcagttccatatgttggtgaagcactgacaattttgaggaaagaggtggataataaagctgcagtccttggttttgtcggggcaccgttcactctggcatcatatgtggttgaaggtggttcatcaaaaaacttctcaaaaataaagagattggctttctcagaatccaagatcctgcactcgttactgcagaagtttacaacatcaatggcaagatacattcaataccaagctgacaatggagctcaagctgttcagatctttgattcatgggcaacagaactcagtccagtggattttgaagaattcagtttgccttacttgaagcagatcattgatactgtgaagaaaagtcatccagacctccctttgatcctctatgcaagtgggtctgggggcttgcttgaaagactagctttgacaggtgtggatgtagttagcttggattggacggttgatatggctgacggtaggaggcgactgggaccgaatatagctgtccaggggaacgtcgaccctggtgttctttttggttcaaaagagttcatcactgatcggataactgatactgtgagaaaagcaggtagagggaaacatatcttgaatcttggacatggcattaaagtaggtacgcctgaggagaatgttgcacatttttttgaggttgctaaatcaatcagatactaa

SEQ ID NO: 414 - protein, 387 aa, Glycine max
MLCVNTAFTSFLPRKSTCVFSSKSTTPISCTLQGTVAEPKSTAAAEPLLLNAVRGIDVERPPVWLMRQAGRYMKSYQTICEKYPSFRERSENVDLVVEISLQPWHVFKPDGVILFSDILTPLSGMNIPFDIVKGKGPVIFDPIHTSAQVDQVKEFIPEESVPYVGEALTILRKEVDNKAAVLGFVGAPFTLASYVVEGGSSKNFSKIKRLAFSESKILHSLLQKFTTSMARYIQYQADNGAQAVQIFDSWATELSPVDFEEFSLPYLKQIIDTVKKSHPDLPLILYASGSGGLLERLALTGVDVVSLDWTVDMADGRRRLGPNIAVQGNVDPGVLFGSKEFITDRITDTVRKAGRGKHILNLGHGIKVGTPEENVAHFFEVAKSIRY

SEQ ID NO: 415 - DNA, 1230 bp, Glycine max
atggctacttccattaacagtgctctggggtggaaacattcctccttgttcgtacaatctaataatggctttaacgtggcttcgcctcctttcaaacataaaccgccacgctcctccaagttttctctcacttgctctgccgcttcctcttcttctgatccactattggttaaggctgctaggggggatcctgttagtcgtcctccggcatggatgatgcgccaggccggaaggtacatggctgtttacaaaaagcttgctgagaaatatccatccttccgagagaggtcagagacaactgatctcattgtggaaatttctttgcagccttggaatgctttcaggcctgatggagtaattatcttctcggacatccttacaccacttcctgcgtttggagttgattttgacatagaagaagtaaggggacctgttatacattcgcccattcgttctgaggaaggattaaaggttttacatccaattgacctggacaggcttaaatttgttggagattcactaaagatactgcgccaagaggttggtggtcatgcagctgttttgggttttgtgggagcaccttggacaatagcaacatatatagtggaagggggtacaacacgcacatatacaaccattaagagcatgtgccacactgccccacatgtattgaggactttgctttctcatttgacgcaggcaatagctgattacgttattttccaagtggagtctggggctcattgcatacaaatatttgattcatggggtggacaactaccacctgaaatgtgggaacgctggtcaaagccttatatcaaagagattgtaaatttggtcaagaaaaaatgccctggggtaccaattgttctttatataaacggaaatggtggtcttcttgagcgtatgaaagacaccggagttgatgttatagggctagactggacagtggatatggcagatggaagaagaagattgggtagtgggataggtgttcagggaaatgtggaccctgcctacttattctcccctcttgatgccctgactgaagaaattcagagggttgtgaggtgtgcgggacctagacggcatatccttaatctcggacatggtgttcttgttggcacacctgaagaagctgttgcacatttctttgaagtagctaggagcttgcagtttgacacactttttcaaaacaatactgcaaaaggccctaatcttgtaacttaa

SEQ ID NO: 416 - protein, 409 aa, Glycine max
MATSINSALGWKHSSLFVQSNNGFNVASPPFKHKPPRSSKFSLTCSAASSSSDPLLVKAARGDPVSRPPAWMMRQAGRYMAVYKKLAEKYPSFRERSETTDLIVEISLQPWNAFRPDGVIIFSDILTPLPAFGVDFDIEEVRGPVIHSPIRSEEGLKVLHPIDLDRLKFVGDSLKILRQEVGGHAAVLGFVGAPWTIATYIVEGGTTRTYTTIKSMCHTAPHVLRTLLSHLTQAIADYVIFQVESGAHCIQIFDSWGGQLPPEMWERWSKPYIKEIVNLVKKKCPGVPIVLYINGNGGLLERMKDTGVDVIGLDWTVDMADGRRRLGSGIGVQGNVDPAYLFSPLDALTEEIQRVVRCAGPRRHILNLGHGVLVGTPEEAVAHFFEVARSLQFDTLFQNNTAKGPNLVT

SEQ ID NO: 417 - DNA, 927 bp, Glycine max
atggatgatgcgccaggcaggaagccttggaaagctttcagaccagatggagtcattatcttctcagacatccttacaccacttcctgcatttggagttgattttgacatagaagaagtaaggggacctgttatacattcacccattcattctgaggaaggattaaaggttttgcatccaattgacctggacaggcttaaatttgttggagattcacttaagatactgcgccgagaggttggtggtcatgcagctgttttgggttttgtgggagctccttggacaatagcaacatatatagtggaagggggtacaacacgcacatatacaaccattaagagcatgtgtcacactgctccacatgtattgaggactttgctttctcatttgacacaagcaatagctgattatgctattttccaagtggagtctggggctcactgcatacaaatatttgattcatggggtggacaactaccacctgaaatgtgggaatgctggtcaaagtcatatatcaaagagattgtaaatttggtcaagaaaaaatgccctgaggtaccaattgttctttatataaatggaaatggtggtcttcttgagcgtatgaaagacactggagttgatgttatagggctagactggacagtggatatggcagatggaagaagaagattgggtagtgggataagtgttcagggaaatgtggaccctgcctacttgttctctcctcttgatgccctgactgaagaaattcagagggttgtgaggtgtgcgggacctagacggcacatccttaatctcggacatggtgttcttgttggcacgcctgaagaagctgttgcacatttctttgaagtagctaggagcttgcagtttgaaacactttttcaaaacaataccgcaaaagaccctaatcttgtaacttaa

SEQ ID NO: 418 - protein, 308 aa, Glycine max
MDDAPGRKPWKAFRPDGVIIFSDILTPLPAFGVDFDIEEVRGPVIHSPIHSEEGLKVLHPIDLDRLKFVGDSLKILRREVGGHAAVLGFVGAPWTIATYIVEGGTTRTYTTIKSMCHTAPHVLRTLLSHLTQAIADYAIFQVESGAHCIQIFDSWGGQLPPEMWECWSKSYIKEIVNLVKKKCPEVPIVLYINGNGGLLERMKDTGVDVIGLDWTVDMADGRRRLGSGISVQGNVDPAYLFSPLDALTEEIQRVVRCAGPRRHILNLGHGVLVGTPEEAVAHFFEVARSLQFETLFQNNTAKDPNLVT

SEQ ID NO: 419 - DNA, 1164 bp, Glycine max
atgctttgcgtcaacactgccttcacctctttcttgcccagaaaatcaatttgcttcttttcctccaaatcaaccaccccaatttcctgcaccctccaaggaacagttgcagaaccaaaatctacagctgctggtgaacctcttttgctaaatgcagttcgtgggatagatgttgaaagacccccggtttggctcatgaggcaagcagggaggtacatgaagagttaccaaaccatctgtgagaaatatccttcattccgtgaaagatctgaaaatgttgatctcgtggtggaaatttctctgcaaccatggcatgtttttaagcccgatggagtgattttattctcagacattcttaccccactttctggaatgaatataccctttgatattgtgaagggtaagggtcctgttatatttgatcctattcacacagctgcccaggttgatcaagtgagggagtttattcctgaagaatcagttccatatgttggtgaagcactgacaattttgaggaaagaggtggataataaagctgcagtccttggttttgttggggcaccattcaccctggcatcatatgtggttgaaggtggttcatcaaaaaacttctcaaaaataaagagattggctttctctgaatccaagatcctgcactcattactgcagaagtttacaacatcaatggccagatacattcaataccaagctgacaatggagctcaagctgttcagatctttgattcatgggcaacagaacttagtccagtggattttgaagaattcagtttgccttacttgaagcagattattgatactgtgaagaaaagtcatccaaacctccctttgatcctctatgcaagtgggtctgggggtttgcttgaaagactagctttgacaggcgtggatgtagttagcttggattggacggttgatatggctgatggtaggaggcgactgggaccgaatatagctgtccaggggaacgtggaccctggcgttctttttggttcaaaagagttcatcactgatcggataaatgatactgtgagaaaagcaggtagagggaaacatatcttgaatcttggacatggcattaaagtaggtacgcctgaggagaatgttgcacatttttttgaggttgctaaatcaatcagatactaa

SEQ ID NO: 420 - protein, 387 aa, Glycine max
MLCVNTAFTSFLPRKSICFFSSKSTTPISCTLQGTVAEPKSTAAGEPLLLNAVRGIDVERPPVWLMRQAGRYMKSYQTICEKYPSFRERSENVDLVVEISLQPWHVFKPDGVILFSDILTPLSGMNIPFDIVKGKGPVIFDPIHTAAQVDQVREFIPEESVPYVGEALTILRKEVDNKAAVLGFVGAPFTLASYVVEGGSSKNFSKIKRLAFSESKILHSLLQKFTTSMARYIQYQADNGAQAVQIFDSWATELSPVDFEEFSLPYLKQIIDTVKKSHPNLPLILYASGSGGLLERLALTGVDVVSLDWTVDMADGRRRLGPNIAVQGNVDPGVLFGSKEFITDRINDTVRKAGRGKHILNLGHGIKVGTPEENVAHFFEVAKSIRY

SEQ ID NO: 421 - DNA, 1212 bp, Hordeum vulgare
atgatgtccccgacgactaccgctacggctacggccacggccgccgccttcctctccgcggctcctgcctcctcgtcctccacccaccgccggcgtagccgtctccctgctatctccgcctccctcccgtccgaagaaccgctgctcatacgtgcggcgaggggcgaggacgggctgcccaggccgccggcgtggatgatgcggcaggctgggcggtacatggcgtcgtaccaggcgctgtccaagcgccacccttcgttccgggagcggtcggagaccaccgacctcatcgtcgaaatcacgctacagccctggcacgccttcgcacccgacggcgtcatcctattctcggacatactcacgccgctgccggccatcggggtgccgtttgatatctcggaatccaaggggccggtgatccagtcgcctgtgcggacggaggaacaggtcagggagctcgttcccatagatctcgataagctccagttcgttggggagtcgctcaagattctgcgcagcgagattgatggaaaagctgctttgctaggattcgtgggggccccatggacaattgcaacttatgttgttgaaggagggatgaccaacacttacacaaatataaagcgcatgtgccacacagcaccaaatgtcttgaggggccttctctctcacctcgcagaagctatatctgactatatcatttaccaagtaaactctggtgctcagtgtatacagatatttgattcttggggtgggcaacttccacctcatgtgtgggagcaatggtcaaaaccatacatcagacagattgtggctaagattaagacagaatgccctcacataccactcgtactgtatataaatggaaatggaggcttgcttgagcgcatgaaggacataggagttgatgttattgggcttgactggacagtggatatggcagatggaaggaggcgcattggtgatggaattagtgtacaagggaatgtggacccagcatatctattttcaccattaccagtattgactgatgaaatccatagggttgtgaaatcagctggcccgaaaggtcatatacttaacttgggccatggtgttcttcagcaaacaccagaagaagccgtagcacatttctttgatgtcacaaggagcttgagatatgacacccttttccagggtcaacttactgaagaattgcaacctgttgcttga

SEQ ID NO: 422 - protein, 403 aa, Hordeum vulgare
MMSPTTTATATATAAAFLSAAPASSSSTHRRRSRLPAISASLPSEEPLLIRAARGEDGLPRPPAWMMRQAGRYMASYQALSKRHPSFRERSETTDLIVEITLQPWHAFAPDGVILFSDILTPLPAIGVPFDISESKGPVIQSPVRTEEQVRELVPIDLDKLQFVGESLKILRSEIDGKAALLGFVGAPWTIATYVVEGGMTNTYTNIKRMCHTAPNVLRGLLSHLAEAISDYIIYQVNSGAQCIQIFDSWGGQLPPHVWEQWSKPYIRQIVAKIKTECPHIPLVLYINGNGGLLERMKDIGVDVIGLDWTVDMADGRRRIGDGISVQGNVDPAYLFSPLPVLTDEIHRVVKSAGPKGHILNLGHGVLQQTPEEAVAHFFDVTRSLRYDTLFQGQLTEELQPVA

SEQ ID NO: 423 - DNA, 759 bp, Lactuca serriola
atgtcaattatgtacagttttccttcattctcctcgatctccgtttccaattttacttatcgtcgtccaaatcgtatcatctgctccgccggagcacctgttgcagaacgaaaagctgtgaatacaactgaaccacttttacttaatgctgttcgtggtgaagatgtagaaagacccccagtttggcttatgagacaagcagggaggtacatgaagagttatcaaaccttatgtgagaagcatccttccttccgtgaaagatcagagaatgtagatcttgttgtggagatttctctacagccatggaaggtcttcaagcctgatggagttattttgttttcagacattcttacacctctaccaggaatgaacataccctttgacatcgttaaaggaaagggtcccatcatattcgatccaatcagcacagccgctcaggttgaccaagtcagagaattcacccccgaagagtgggtcccatatgttggggaggccttaacaattttaagaaaagaggtaaataacgaagcagcagttcttggttttgttggagctcctttcaccctcgcatcatatgtggttgaaggcggatcatcgaaaaacttttccaaaataaagactctcgctttctcacagcctaaggtacttcacgcgttgcttgagaaattcacaacatcaatggctaaatacattaagtaccaagcagaacaacggggcccaagcgggttcaaatattcgactcatgggcaaccgaactga

SEQ ID NO: 424 - protein, 252 aa, Lactuca serriola
MSIMYSFPSFSSISVSNFTYRRPNRIICSAGAPVAERKAVNTTEPLLLNAVRGEDVERPPVWLMRQAGRYMKSYQTLCEKHPSFRERSENVDLVVEISLQPWKVFKPDGVILFSDILTPLPGMNIPFDIVKGKGPIIFDPISTAAQVDQVREFTPEEWVPYVGEALTILRKEVNNEAAVLGFVGAPFTLASYVVEGGSSKNFSKIKTLAFSQPKVLHALLEKFTTSMAKYIKYQAEQRGPSGFKYSTHGQPN

SEQ ID NO: 425 - DNA, 762 bp, Lactuca virosa
atgtcaattatgtacagttgttcggttccttcattctcctcgatctcggtttccaattttacttatcgtcgcccaaatcgtatcatctgctccgccggagcacctgttgcagaacgaaaagctgtaaatacaactgaaccacttttacttaatgctgttcgtggtgaagatgttgatagacccccagtttggcttatgagacaagcagggaggtacatgaagagttatcaaaccttatgtgagaagcatccttccttccgtgaaagatcagagaatgtagatcttgttgtggagatttctctacagccatggaaggtctttaagcctgatggagttattttattttcagacattcttacacctctaccaggaatgaacataccctttgacatcgttaaaggaaagggtcccatcatattcgatccaatcagcacagccgctcaggttgaccaagtcagggaattcacccccgaagagtgggtcccatatgttggggaagccttgacaattttaagaaaagaggtaaataacgaagcagcagttcttggttttgttggagctcctttcacccttgcatcatatgtggttgaaggcggatcatccaaaaacttttccaaaataaagactctcgctttctcacagcctaaggtacttcacgcgttgcttgagaaattcacaacatcaatggctaaatacattaagtaccaagcagaaaacggggcccaagcggttcaatattcgactcatgggcaaccgaactga

SEQ ID NO: 426 - protein, 253 aa, Lactuca virosa
MSIMYSCSVPSFSSISVSNFTYRRPNRIICSAGAPVAERKAVNTTEPLLLNAVRGEDVDRPPVWLMRQAGRYMKSYQTLCEKHPSFRERSENVDLVVEISLQPWKVFKPDGVILFSDILTPLPGMNIPFDIVKGKGPIIFDPISTAAQVDQVREFTPEEWVPYVGEALTILRKEVNNEAAVLGFVGAPFTLASYVVEGGSSKNFSKIKTLAFSQPKVLHALLEKFTTSMAKYIKYQAENGAQAVQYSTHGQPN

SEQ ID NO: 427 - DNA, 1191 bp, Malus domestica
atgcatccaatcatgtcttgcattcacagctacggctccatagcttccatctctctccccacctccccttccttcactccaagatccagatgcgtccccaggtctcgcttcctctgcgccgtcggaggaagtgtggcagaagcccaagttgcgtccattgctgagccccttttgctcaatgcagttcgtggggacgatgttgagagacccccagtttggctcatgaggcaagcagggaggtacatgaagagttatcaaactctctgcgagaggtacccttcgtttcgagaaagatccgaaaatgttgacctcgttgttgaaatttcgctacagccctggaaggtcttcaagcctgatggagtcattttgttctcggatattttaactcctctttctgggatgaatataccatttgacattgtaaaaggtaagggtcctgtaatatttgatcctctgcaaactgccgatgatgttgttcaagtaagagaatttgttccacaagaatcagttccatatgttggggaagcgttgacaatcttgcgaaaagaggtagataataaggcagcagtgctaggttttgtcggggctcctttcaccctagcatcatatgttgtggaaggtggttcatcaaagcatttctcaaagataaagagattagccttctctcaaccaaaggtcctccatgcattacttcaaaaattcacaacttcgatgacaaaatatattcgataccaagctgataatggagctcaagccgttcagatctttgactcatgggccacagaactcagccctgtggattttgaggaattcagcctgccatacttgaagcaaatcgtggatgctgtgaaagagacccatccagatctccctttaatcctttacgcaagcggatccgggggtttgctcgagaggctagctctgacaggtgttgatgtagttagcttggactggactgttgatatggcggaaggtagaaggcgactgggaccaaatatagcagttcaaggtaatgtggatcctggtgttctcttcggttcaaaagaattcatcaccagcagaataaacgatacagtgaggaaagccggtagagggaaacatattttgaatcttggccacggcattgtagtaggtacaccccaggagaacgttgctcatttctttgaggtcgctaaagatatcagatactga

SEQ ID NO: 428 - protein, 396 aa, Malus domestica
MHPIMSCIHSYGSIASISLPTSPSFTPRSRCVPRSRFLCAVGGSVAEAQVASIAEPLLLNAVRGDDVERPPVWLMRQAGRYMKSYQTLCERYPSFRERSENVDLVVEISLQPWKVFKPDGVILFSDILTPLSGMNIPFDIVKGKGPVIFDPLQTADDVVQVREFVPQESVPYVGEALTILRKEVDNKAAVLGFVGAPFTLASYVVEGGSSKHFSKIKRLAFSQPKVLHALLQKFTTSMTKYIRYQADNGAQAVQIFDSWATELSPVDFEEFSLPYLKQIVDAVKETHPDLPLILYASGSGGLLERLALTGVDVVSLDWTVDMAEGRRRLGPNIAVQGNVDPGVLFGSKEFITSRINDTVRKAGRGKHILNLGHGIVVGTPQENVAHFFEVAKDIRY

SEQ ID NO: 429 - DNA, 1224 bp, Medicago truncatula
atggaaaccattcctacttccatcaacagtggtttaggatggaaatcttcccccttatttcaacaatccaattgcttcaaccttctttcttctccattcaaaccaaaaccctctctcaccaagtttacactcacttgctctgccgcttcatcttcttcttctgatcctctcttggttaaggctgcgagaggagatcctgttagccgtcctccggcatggatgatgcgccaagcaggaaggtacatggctatttacagaaagttagctgagaaacatccatccttcagagagaggtcagagacgactgatctcattgtagaaatttctttgcagccttggaaagctttcaggcctgatggagtaattattttctccgacatcctaacacctctacctgcgtttgggattgactttgacatagaagatgtgaggggacctgtaatacagtcaccgatacgctctgaggagggattaaaggttttgcacccaattgacttcgacaagcttagatttgtaggagaatcacttaagatcctgcagcaagaggttggtggtgatgccgctgttttaggttttgtgggagcaccttggacattggcaacatatatagtggaagggggtacaacgcgcacatatacaaatattaagagcatgtgccatacagcaccacacatactacggactctgctttctcatttgtcaaaggcaatagcagattacatcgttttccaagtggaatctggggctcactgcatacaaatatttgattcatggggtggacaactgccacctcatatgtgggaactctggtcaaagccttatatcaaagagattgtaaatttggtcaagaaaaagtgcccagacacaccacttgttctttatataaatggaaatggcggccttctcgagcgtatggtagacactggagttgatgttattggacttgactggacagtggatatggctgatgggagaagaagattaggtagcgggataggtgtgcaaggaaatgtggaccctgcttccttattctctcctcttacttccctaacagaagaaattcagagggttgtgaggtctgcaggacctagacaacacatccttaatcttgggcatggtgttcttgttggcacacctgaagaagctgtagcacatttctttgacgtcgcgaggagcttgaagtttgacacagtctctcaaaacaacactgcaaatgtagcttaa

SEQ ID NO: 430 - protein, 407 aa, Medicago truncatula
METIPTSINSGLGWKSSPLFQQSNCFNLLSSPFKPKPSLTKFTLTCSAASSSSSDPLLVKAARGDPVSRPPAWMMRQAGRYMAIYRKLAEKHPSFRERSETTDLIVEISLQPWKAFRPDGVIIFSDILTPLPAFGIDFDIEDVRGPVIQSPIRSEEGLKVLHPIDFDKLRFVGESLKILQQEVGGDAAVLGFVGAPWTLATYIVEGGTTRTYTNIKSMCHTAPHILRTLLSHLSKAIADYIVFQVESGAHCIQIFDSWGGQLPPHMWELWSKPYIKEIVNLVKKKCPDTPLVLYINGNGGLLERMVDTGVDVIGLDWTVDMADGRRRLGSGIGVQGNVDPASLFSPLTSLTEEIQRVVRSAGPRQHILNLGHGVLVGTPEEAVAHFFDVARSLKFDTVSQNNTANVA

SEQ ID NO: 431 - DNA, 1170 bp, Medicago truncatula
atgttttgcggcgtagttagcacttccttcacttccattttacccagaaaacaacaccactccacacccttttccccattcaaatccattcaatgttctcttccaggagctgttgctgaacctaaaacaaataatgccacagaacctcttttgctcaatgcagttcgtggattagatgtcgaaagacctcctgtttggcttatgaggcaagctgggaggtacatgaagagttaccaaatcatctgcgaaaaatatccgtcattccgggaaagatctgaaaatgttgatctcgtggttgaaatttcattgcaaccgtggaaggttttccagcctgatggggtgatattattctcagacattcttacacccctatctggaatgaatattccatttgacattgtaaaaggcaagggtcctgtcatatttgacccagttcactccgcaggccaagttgatcaagtgagggagtttattcccgaggaatcagttccatacgttggtgaagcactatcaattttgcgcaaagaggtagataataaatctgcagtccttggttttgtgggtgctccgtttaccctggcgtcgtatgtggttgaaggcggttcatcaaaacatttctctaaaataaagagattggcattctctgaaccaaagatccttcactcattactgcaaaagtttacaacatcaatggcaagatacatacaataccaagctgacaatggagcgcaagctgtgcagatattcgattcatgggcaacggagcttagtccagtggattttgaacgattcagtttgccatacttgaagcaaattatcgacactgtaaagaaaagccatccagaactccctcttatcctctatgcaagtggatcaggaggcttacttgagagaatagcattgaccggtgtggatgttgttagcttggattggacagtcgatatggctgacggtagaaggagattaggaccaaatgtagctatccaaggtaatgttgatcctggtgttctgtttggatcgaaagagctgattacagataggatacacgatactgtgagaaaggctggtagagggaaacatatcctaaaccttggtcacggcattgtagtaggtactcctgaggagaatgtagcacatttttttgaggttgccaaaggaatcaaatactaa

SEQ ID NO: 432 - protein, 389 aa, Medicago truncatula
MFCGVVSTSFTSILPRKQHHSTPFSPFKSIQCSLPGAVAEPKTNNATEPLLLNAVRGLDVERPPVWLMRQAGRYMKSYQIICEKYPSFRERSENVDLVVEISLQPWKVFQPDGVILFSDILTPLSGMNIPFDIVKGKGPVIFDPVHSAGQVDQVREFIPEESVPYVGEALSILRKEVDNKSAVLGFVGAPFTLASYVVEGGSSKHFSKIKRLAFSEPKILHSLLQKFTTSMARYIQYQADNGAQAVQIFDSWATELSPVDFERFSLPYLKQIIDTVKKSHPELPLILYASGSGGLLERIALTGVDVVSLDWTVDMADGRRRLGPNVAIQGNVDPGVLFGSKELITDRIHDTVRKAGRGKHILNLGHGIVVGTPEENVAHFFEVAKGIKY

SEQ ID NO: 433 - DNA, 1176 bp, Nicotiana tabacum
atgatgtcttgtaattactctttctcttctatatctccttcctctaaatctgcttttacttctccctctaactttaatctcaaccccagattaatctgttgctctgctggaggaactgttgcggaaccaaaagctataaatgcaacacaaccattgttgcttgatgctgtacggggtaaagaagtagaaagacctcccgtttggcttatgagacaagcagggaggtatatgaagagctatcaactcctctgcgagaagtacccattgttccgtgatagatcagagaacgttgatcttgtggtagaaatttctctacaaccctggaaagtattcaggcctgatggggtcattttattttcagacattcttactcctctttcagggatgaatatccctttcgacattataaaggggaagggtcctgtcatatttgatcccctgagaacagctgctgatgttgagaaagttagagaattcattcctgaaaaatcagttccatatgttggagaagcattaacaattttgcggaaagaggtcaataatcaagcagcagttcttggtttcgttggggcaccttttaccctggcgtcatatgtggttgaaggtggttcctctaagaacttcacaaagataaagagattagcttttgcagagcccaaggtcctgcatgctctccttcaaaaatttgcgacctctatggctaaatatatccgttaccaagcagacagtggagctcaagcagttcagatctttgattcatgggctactgagctaagcccagtcgattttgaagagtttagtctgccttatttaaaacagatagtggattcagtgaaactaacccatcctaacctcccactgattctttacgcaagtggatctggtggcttgcttgagagacttcccttgacaggtgtggatgtagtaagcttggattggacagttgatatggctgatggaaggagacgactgggccctaatgttgccatacaaggtaatgtggatcctggtgtcctttttggctcaaaagaatttatcaccaatcgaataaatgataccgtcaagaaagctggtaaagggaaacatattttgaaccttggacatggcatcaaggtaggcaccccggaggaaaatgttgctcacttttttgagattgctaaaggacttaggtattag

SEQ ID NO: 434 - protein, 391 aa, Nicotiana tabacum
MMSCNYSFSSISPSSKSAFTSPSNFNLNPRLICCSAGGTVAEPKAINATQPLLLDAVRGKEVERPPVWLMRQAGRYMKSYQLLCEKYPLFRDRSENVDLVVEISLQPWKVFRPDGVILFSDILTPLSGMNIPFDIIKGKGPVIFDPLRTAADVEKVREFIPEKSVPYVGEALTILRKEVNNQAAVLGFVGAPFTLASYVVEGGSSKNFTKIKRLAFAEPKVLHALLQKFATSMAKYIRYQADSGAQAVQIFDSWATELSPVDFEEFSLPYLKQIVDSVKLTHPNLPLILYASGSGGLLERLPLTGVDVVSLDWTVDMADGRRRLGPNVAIQGNVDPGVLFGSKEFITNRINDTVKKAGKGKHILNLGHGIKVGTPEENVAHFFEIAKGLRY

SEQ ID NO: 435 - DNA, 1164 bp, Ocimum basilicum
atgaattgcatttacagcacctcagtttcatcgatttccactaaattgaatcttccccctcaatttaatcacaaagccaaattcttctgctctcttggaggagctgttgcagagccaaaagctgtaaatgtgacggagcctttgttgcttaatgccgcacgaggaaaagacgtagagaggccaccagtttggcttatgagacaagcagggaggtacatgaagagttaccaaatcctctgtgagaagtatccgtcgttccgcgaaagatcggaaaatgtagatcttgtggtggaaatctctcttcaaccgtggaatgtttttaaacctgacggggtgatcttattctctgatattcttacaccgttgactggtatgaatataccttttgacattgtgaaaggtaagggtcctatcatatttgatccaatacgctctgctgccgatgttgaaaaggtgggggaattcactcctaatgagtcagtcccatatgttggagaagctttgtcgatattgcgcaaggaggtaaacaacgaagccgcagttctaggtttcgtcggggcaccattcaccctggcttcttacgtcgttgaaggaggttcctcaaagcacttctcaaagattaaaagattggcattctcagagcctaaggtccttcacgccctacttcaaaagtttgcgacctccatggccaagtacatccagtaccaagccgacaagggggctcaagctgttcagattttcgactcgtgggccacagagctcagccccgtggatttcgaagagttcagtcttccttacctgaaacaaatcgtggacactgtgaggcgcacccatccgagcctcccgctgatcctgtatgcaagtgggtcaggtgggctgatcgagaggctgcctttgacgggtgtggacgtggttagcttggattggacggtggacatggcggaaggtagacgacgacttgggcctaatgtggccgtgcaaggtaatgtggacccgggggtcctgttcgggtcaaaagagttcatcacggagagaataaaggacaccgttaggaaagctgggaaggggaaacacatattgaatcttgggcatgggattgtggtgggtaccccggaggaaaatgttgctcatttttttgaggttgccaagggccttagatattag

SEQ ID NO: 436 - protein, 387 aa, Ocimum basilicum
MNCIYSTSVSSISTKLNLPPQFNHKAKFFCSLGGAVAEPKAVNVTEPLLLNAARGKDVERPPVWLMRQAGRYMKSYQILCEKYPSFRERSENVDLVVEISLQPWNVFKPDGVILFSDILTPLTGMNIPFDIVKGKGPIIFDPIRSAADVEKVGEFTPNESVPYVGEALSILRKEVNNEAAVLGFVGAPFTLASYVVEGGSSKHFSKIKRLAFSEPKVLHALLQKFATSMAKYIQYQADKGAQAVQIFDSWATELSPVDFEEFSLPYLKQIVDTVRRTHPSLPLILYASGSGGLIERLPLTGVDVVSLDWTVDMAEGRRRLGPNVAVQGNVDPGVLFGSKEFITERIKDTVRKAGKGKHILNLGHGIVVGTPEENVAHFFEVAKGLRY

SEQ ID NO: 437 - DNA, 1173 bp, Oryza glaberrima
atggcgaccgcgtgcccgccgctctcgctgcagccggcctacctctcggggaggtccgcgcgcgcccgccgcccgccgcccgccgtccgctgcagcgccgtcggagaggttatggcggagacggcggcggtcgggacggcggaggagccgctgctggtgagcgcgatcaaggggaggaaggtcgagagaccgccggtctggctcatgaggcaggccgggaggtacatgaagagctatcaattgctctgcgagcgacatccttcattccgtgaaagatcagaaaatgttgaccttgttgttgagatctctctacaaccatggaaggttttcaagcccgatggagttatcctgttctcagatatccttacaccgcttcctgggatgaacataccttttgacattgtgaaaggaaaaggtccagtgatatttgatcccttgagaacagcagctgctgtgaatgaggtcagagaatttgttccagaggagtgggtcccatatgttgggcaggctttaaacattttgcgggaagaggttaacaatgaagctgccgtgttgggctttgttggagctccctttacattggcatcctattgtgtggaaggaggttcatcaaagaacttttcaaagattaagaaaatggccttctcagaaccagagattctgcataatttgctacagaaatttactacgtccatggctaactacattaaataccaagctgacaacggagcacaagctgtccaaatttttgactcatgggctacagaactcagcccagttgattttgaggagtttagcttgccttatctgaagcagattgtggatagtgtcaaagaaacacatcctgaattgcctctgatactatatgcaagtggatctggtggactgctggagaggcttccactgacaggtgttgatgttgttagcttggactggacggttgatatggctgaggggaggaaaagattgggatctaacatagcggttcaagggaatgttgaccctggcgttctttttgggtcaaaagagttcataagcaagcggatttttgacactgtgcagaaagctggtaatagtgggcatgtattgaaccttggtcatggcattaaggtaggcactcctgaggaaaatgttgcccatttctttgaggttgcaaaagggatcagatactga

SEQ ID NO: 438 - protein, 390 aa, Oryza glaberrima
MATACPPLSLQPAYLSGRSARARRPPPAVRCSAVGEVMAETAAVGTAEEPLLVSAIKGRKVERPPVWLMRQAGRYMKSYQLLCERHPSFRERSENVDLVVEISLQPWKVFKPDGVILFSDILTPLPGMNIPFDIVKGKGPVIFDPLRTAAAVNEVREFVPEEWVPYVGQALNILREEVNNEAAVLGFVGAPFTLASYCVEGGSSKNFSKIKKMAFSEPEILHNLLQKFTTSMANYIKYQADNGAQAVQIFDSWATELSPVDFEEFSLPYLKQIVDSVKETHPELPLILYASGSGGLLERLPLTGVDVVSLDWTVDMAEGRKRLGSNIAVQGNVDPGVLFGSKEFISKRIFDTVQKAGNSGHVLNLGHGIKVGTPEENVAHFFEVAKGIRY

SEQ ID NO: 439 - DNA, 1020 bp, Ostreococcus lucimarinus
atgctgcgcgcgatccgaggcgaagacgtcgagcgaccgccgatctggatgatgcgacaggcggggagatacatgaaggtgtatcaagacttgtgcaaaaagcacacgacgtttcgagagcgaagcgagacggtggatctcgcggtagagatctcgctgcagccgtacgaggcgtttaaacccgatggggtgattttgttcagcgatattctcacgccgttgcaagggatgaacattccgttcgacatcgtaaagggaacggggccgatcatcttcaacccggtgcgcgagatggacgatatcaagagcatcacgccgttggagccggagaagagcgtgccgttcgtcggggagtcgttgaaggtgttgagaaatgaaattgggaacgaggcgacgctgctcgggttttgtggagcgccgtttacgttggcgtcttacatcgtcgagggcgggacgagctcgcactacaaggtgattaagaaaatggcgttcgattcgccagcggtgtacgaggcgctcatgaataagctcacggacgccgtgatcgagtacacgcggtaccaagcggactctggggcgcaagtggtgcaaattttcgactcgtgggcaagcgagttttcgcccgcggatttcgaagtgtactgcctgccgtacctccaacgcatcgtcgccgagtgcaagcaaacccacccacacgtgccgctcatcctttacagctctggaagtgccggtttcttggagcgcttagcgacgacgaacgcggatgttatcagcttagacgggacgattgacatggcggacgcgcgcgctcgactcggtatggatcaggcggtgcaagggaacatggatccgctccacctctttgcgtcgcaagatttcatcacgaaaaaggtgcacgaaacgatcgccaaggctggaaacaagaagcacgtcatgaatctcggtcacggggtcatggtcggcaccccagaggaaaacgttggacacttcttcaagaccgttcgagacttccggtattaa

SEQ ID NO: 440 - protein, 339 aa, Ostreococcus lucimarinus
MLRAIRGEDVERPPIWMMRQAGRYMKVYQDLCKKHTTFRERSETVDLAVEISLQPYEAFKPDGVILFSDILTPLQGMNIPFDIVKGTGPIIFNPVREMDDIKSITPLEPEKSVPFVGESLKVLRNEIGNEATLLGFCGAPFTLASYIVEGGTSSHYKVIKKMAFDSPAVYEALMNKLTDAVIEYTRYQADSGAQVVQIFDSWASEFSPADFEVYCLPYLQRIVAECKQTHPHVPLILYSSGSAGFLERLATTNADVISLDGTIDMADARARLGMDQAVQGNMDPLHLFASQDFITKKVHETIAKAGNKKHVMNLGHGVMVGTPEENVGHFFKTVRDFRY

SEQ ID NO: 441 - DNA, 966 bp, Ostreococcus lucimarinus
atgatgcgacaagcgggacggtacatgaaggagtaccgggacgtggcggtgaaacatccgagctttcgcgagcgaagcgagacgacggatctgatctgcgagatcacgctgcaaccgtttcgcgcgtttcaaccggatggggtgattctgttcagcgacatcttgaccccgtttccggcgttcgggatcgatttcgagattgacgattacaagggaccgatgttggagaagacgattcgaagcgcggaggatttgaagatgttgcacgaagttgatttgagtaaggttgagttcgtggcggattcgttgaagattttgcgacaagaggttggtgatgaagcggccgtgctcggtttcgtcggcgcgccgtggacgctgtgcacgtacatcgtcgaagggcaatcgacgtcgacgtacaaaaccatcaagtcgatgtgcttcaacaatcccgaggtgttgcacaagttgctgagcgccgtggcggacgcgttggcggtgtacgtcggattccaaatcgatgccggcgcgcaagtgattcaagtgttcgactcttggggtggacaattgccgccgcacatgtgggaggaatggagcaagccgtacatcgagcgcgtcgttcgcaaggtgaaccagacgcacccgggagtgccgattactatgtacgccaacggttcgggcggtcttttggagcgcatggcgacgttgccggtggacaccatcgggctggattggacgatcgatatggaggatggtcgacgccgcgtcggggacaaggcggtgcaaggtaacgtcgatcccgtcgtcctcttcgccggagaagacgcgatcgaaaaggctgtcagagacgtgtgccgcaaggcgggtccgaccggtcacatcctcaacctcggtcacggcgtgctcgtgggcacgcctgaggaatcggtcaagcacttcttcgacgtttctaagacgatcacgtactag

SEQ ID NO: 442 - protein, 321 aa, Ostreococcus lucimarinus
MMRQAGRYMKEYRDVAVKHPSFRERSETTDLICEITLQPFRAFQPDGVILFSDILTPFPAFGIDFEIDDYKGPMLEKTIRSAEDLKMLHEVDLSKVEFVADSLKILRQEVGDEAAVLGFVGAPWTLCTYIVEGQSTSTYKTIKSMCFNNPEVLHKLLSAVADALAVYVGFQIDAGAQVIQVFDSWGGQLPPHMWEEWSKPYIERVVRKVNQTHPGVPITMYANGSGGLLERMATLPVDTIGLDWTIDMEDGRRRVGDKAVQGNVDPVVLFAGEDAIEKAVRDVCRKAGPTGHILNLGHGVLVGTPEESVKHFFDVSKTITY

SEQ ID NO: 443 - DNA, 1185 bp, Ostreococcus lucimarinus
atgcacgggttgacgatcggcgcgacgcgcgcgatgacgctggcgaagagggacgtcgtcggaaagagcgacgcgcgaggacgaaggatgcgaacgcgaaggacgacgacgacgacggcggcggcgggagggaaccaagatccgatcttgcttcgcgcggcgcgaggggaagacgtggaacgaccgccggtgtggctgatgcgtcaggcggggaggtacatggcggagtttcgcgcgtacagtaccaagtacgggttcaggcaccgaagcgagacgccggagatcgccatcgagctgtcgatgcaaccgtggcgggcgtttaagccggatggggttatcatgtttagtgatattttgactccgttgccggcgttggggatcgagttcgatgtcgtgaaggggaaagggccggtggtgacgccggtgaggacgatggacgacgtcaaggcgatgaagcagctggacgatccagattcgcaattgccgttcgttcgtgagattttgagcacgcttcggaaagaaatcgaaggccaatccaccatgcttggtttcatcggttcgccgtggacgctcgcggcgtacgccatggaaggttcgagcgatcgacacttggtgacgacgaagcaaatcatgacgcaagatccggagacgctgcacgcgtttttgtccaagttagccgacgctctcggtgtgtacgtgtgccatcagatcgacagtggtgcgcaagtggtgcaaattttcgattcttgggcccaccacctttcgccgcaacagtatctcgagttttcccacccgtataacgagcgcgtcatcgcgtacgtcaagcagcgttatccggacactccgctcatcttccacgcgaacggcggatgcggcaagcttcacgagctcaagaaatctacggcggatgtaattggattggattggaacacgagcatgagcgaggcgcgagcggtgctcggtccggatcgcgtgttgcaaggaaacatggatcccatgtacctcttcgcgagcccggagcgcattagacaagaggtggcgaacaacgtgagagacgccggtagcaggaagcacatcttgaacgtcggtcacggtgtggttcaaggcactccggaggagaacgtcggacacttctgcgatgcggcgcgggcgtcggtttacgcgcccaaggcggttgcgcgatag

SEQ ID NO: 444 - protein, 394 aa, Ostreococcus lucimarinus
MHGLTIGATRAMTLAKRDVVGKSDARGRRMRTRRTTTTTAAAGGNQDPILLRAARGEDVERPPVWLMRQAGRYMAEFRAYSTKYGFRHRSETPEIAIELSMQPWRAFKPDGVIMFSDILTPLPALGIEFDVVKGKGPVVTPVRTMDDVKAMKQLDDPDSQLPFVREILSTLRKEIEGQSTMLGFIGSPWTLAAYAMEGSSDRHLVTTKQIMTQDPETLHAFLSKLADALGVYVCHQIDSGAQVVQIFDSWAHHLSPQQYLEFSHPYNERVIAYVKQRYPDTPLIFHANGGCGKLHELKKSTADVIGLDWNTSMSEARAVLGPDRVLQGNMDPMYLFASPERIRQEVANNVRDAGSRKHILNVGHGVVQGTPEENVGHFCDAARASVYAPKAVAR

SEQ ID NO: 445 - DNA, 966 bp, Ostreococcus sp. RCC809
atgatgcgtcaggctgggaggtacatgaaggagtatcgagacgtggcggccaagcacccgggctttcgagagcgaagcgagacgacggatttgatttgtgagattacgttacagccgtttcgagcgtttcaaccggacggggtgattctgttcagtgacatcctgacgccgtttccggcgttcgggatcgattttgagattgatgattacaaagggccgatgctggagaagacgattcgaagcgccgaggatttgaagatgttgcacgacgtcgatttgagtaaagtcgaattcgtcggtgaatcgctgagcatcctgagacgagaggtcggggacgacgccgcggtgttggggttcgtcggtgcgccgtggacgctgtgcacgtacatcgtcgagggtcaatcgacgtcgacgtataaaaccatcaagtcgatgtgctttagcgcgcccgacgtgttgcataaactcttgagctcggtggcggacgcgttggcggtgtacatcgggtaccagattgattccggcgcgcaggtgattcaagtgttcgactcgtggggcggtcaattgccgccgcacatgtgggaagaatggagcaagccgtacatcgatcgcatcgtgcgcaaggtgaacgagacgcacccgggcgtgcccatcaccctctacgccaacgggaacggtggtctcttggagcgcatggccaccttacccgtggatacgatcggtttggattggaccatcgacatggcggacggcagacgccgatgcggtgacaaggcggtgcagggcaacgtcgatcccgtcgtcctcttcgccgaccaagacgccatcgaacaggcggtgcgcgacgtgtgcgccaaggcgggtccgaccggtcacgtcctcaacctcggtcacggtgtcttggtcggcaccccggaggaaaacgtcaagcacttcttcgacgtgtccaagacgatcacgtattaa

SEQ ID NO: 446 - protein, 321 aa, Ostreococcus sp. RCC809
MMRQAGRYMKEYRDVAAKHPGFRERSETTDLICEITLQPFRAFQPDGVILFSDILTPFPAFGIDFEIDDYKGPMLEKTIRSAEDLKMLHDVDLSKVEFVGESLSILRREVGDDAAVLGFVGAPWTLCTYIVEGQSTSTYKTIKSMCFSAPDVLHKLLSSVADALAVYIGYQIDSGAQVIQVFDSWGGQLPPHMWEEWSKPYIDRIVRKVNETHPGVPITLYANGNGGLLERMATLPVDTIGLDWTIDMADGRRRCGDKAVQGNVDPVVLFADQDAIEQAVRDVCAKAGPTGHVLNLGHGVLVGTPEENVKHFFDVSKTITY

SEQ ID NO: 447 - DNA, 1131 bp, Ostreococcus sp. RCC809
atggcgccccgaggcgcgggcgcgaccgcgcgcgcgagaggtgcgctcgcgcgcgtcgacgcggcgaacggagaggcgaaagatcccattctattgcgcgcggcgcggggtgaggacgtcgagcgaccgccggtgtggttgatgcgtcaggcggggaggtacatggcggagtttcgcgcgtacagcaccaagtacgggtttcgatacaggtcggagacgccggaaatcgcgattgaactctccatgcagccgtggcgggcgtttaagccggacggtgtgatcatgtttagcgatatcttgacgccgttgccggcgctcgggatcgagttcgatgtggtgaagggtaagggaccggtggtggaaccggtgcgcacgatggcggacgtcaacgcgatgaaacagctcgatgatccggactcgcagttgccgttcgttcgggagattctcagcacgcttcgaaaggagatcgatggacagtccaccatgctcggtttcgttggatctccgtggacgctcgcggcgtacgccatggagggttccagcgacagacacttgatgacgacgaagcaaatcatgacgcaagatccagagacgcttcacgcgttcttgtctaagttggcggacgcgctcggcgtgtacgtgtgccaccaaatcgatagtggtgcgcaagtagtgcagatcttcgattcctgggcgcaccacctctctccgcagcaattcctcgagttttcccacccgtacaacgagcgcatcatcgcttacgtcaaggaacgacacccggagacgccgctcatcttccacgcgaacggtggcgtcggtaagctccacgagctcaagaagtccactgcggacgtcattggtttggattggaacacgagcatgagcgaagcgagagccatcctcggccccgatcgcgtcttgcaaggtaacatggaccccatgtacctcttcgcgagtccggatcgcattagagaggaggtggcgatgaacgtgaaggacgcgggcaacggtatgcacatcttgaacgtcggacacggggtggctcaaggcaccccggaagagaacgtcggtcacttctgcgacactgcgcgtgcgtcattatatgccgaggttggcgccccggcgcgttag

SEQ ID NO: 448 - protein, 376 aa, Ostreococcus sp. RCC809
MAPRGAGATARARGALARVDAANGEAKDPILLRAARGEDVERPPVWLMRQAGRYMAEFRAYSTKYGFRYRSETPEIAIELSMQPWRAFKPDGVIMFSDILTPLPALGIEFDVVKGKGPVVEPVRTMADVNAMKQLDDPDSQLPFVREILSTLRKEIDGQSTMLGFVGSPWTLAAYAMEGSSDRHLMTTKQIMTQDPETLHAFLSKLADALGVYVCHQIDSGAQVVQIFDSWAHHLSPQQFLEFSHPYNERIIAYVKERHPETPLIFHANGGVGKLHELKKSTADVIGLDWNTSMSEARAILGPDRVLQGNMDPMYLFASPDRIREEVAMNVKDAGNGMHILNVGHGVAQGTPEENVGHFCDTARASLYAEVGAPAR

SEQ ID NO: 449 - DNA, 1209 bp, Oryza sativa
atgatctccgcgacggccaccgccgccttcctcgccgcggcgccggcctcctcctcctcctgcaccacccaccgccggcgcagcggccttcccgccatctccgcgtccctcgcaaccgcctcctccactgaggagccgctgctggtgcgggcggcgaggggcgaggacgggctgccgcggccgccggcgtggatgatgcggcaggccgggcggtacatggcggagtaccaggcgctcgccaagcgccacccctcgttccgggagcggtccgagacgaccgaactcatcgtcgagatcacgctgcaaccgtggcgcgccttcgcgcccgacggcgtcatcctgttctcggacatactcacgccgctgccggccattggggtgccattcgatatctccgactccaaggggcctgtgatccagtctcccgtgaggtccgaggagcaggtgagggagctcacccccattgacttcgagaagctccggttcgtcggtgagtcgctcaagattctacgcactgagattgatggacaagctgctttgctaggatttgtgggggccccatggacaattgcaacttatgttgttgaaggggggatgaccaacacttacacaaatataaagagcatgtgccacacagcaccaaatgtgttaaggggacttttgtctcaccttgcagacgccatatctgaatacattatttaccaagtaaactctggggctcaatgtatacaaatatttgattcatggggtggacaacttccacctcatgtgtgggagcagtggtcaaaaccatatatcaagcagattgtgaataagattaagattgaatgccccaatgtaccacttgttctctatataaatggaaatggaggcttgcttgagcgaatgacggacacaggagtcgatgttattggtcttgactggacagtggatatggcagatggaaggagacgccttggtaacaaaattagtgtacaggggaatgttgacccagcatttctattttctccattaccagtactgaccgatgaaattcatagggttgtcaaatcagctggtccaaaaggtcatatactaaacttgggccatggtgttcttgtaaaaacaccagaagaagctgtagctcatttctttgatgtcacgaggagcttgagatatgacacacttttccaaggttgtgttactgaagttttggagcctgttgcttaa

SEQ ID NO: 450 - protein, 402 aa, Oryza sativa
MISATATAAFLAAAPASSSSCTTHRRRSGLPAISASLATASSTEEPLLVRAARGEDGLPRPPAWMMRQAGRYMAEYQALAKRHPSFRERSETTELIVEITLQPWRAFAPDGVILFSDILTPLPAIGVPFDISDSKGPVIQSPVRSEEQVRELTPIDFEKLRFVGESLKILRTEIDGQAALLGFVGAPWTIATYVVEGGMTNTYTNIKSMCHTAPNVLRGLLSHLADAISEYIIYQVNSGAQCIQIFDSWGGQLPPHVWEQWSKPYIKQIVNKIKIECPNVPLVLYINGNGGLLERMTDTGVDVIGLDWTVDMADGRRRLGNKISVQGNVDPAFLFSPLPVLTDEIHRVVKSAGPKGHILNLGHGVLVKTPEEAVAHFFDVTRSLRYDTLFQGCVTEVLEPVA

SEQ ID NO: 451 - DNA, 1173 bp, Oryza sativa
atggcgaccgcgtgcccgccgctctcgctgcagccggcctacctctcggggaggtccgcgcgcgcgcgccgcccgccgcccgccgtccgctgcagcgccgtcggagaggttatggcggagacggcggcggtcgggacggcggaggagccgctgctggtgagcgcgatcaaggggaggaaggtcgagagaccgccggtctggctcatgaggcaggccgggaggtacatgaagagctatcaattgctctgcgagcgacatccttcattccgtgaaagatcagaaaatgttgaccttgttgttgagatctctctacaaccatggaaggttttcaagcccgatggagttatcctgttctcagatatccttacaccgcttcctgggatgaacataccttttgacattgtgaaaggaaaaggtccagtgatatttgatcccttgagaacagcagctgctgtgaatgaggtcagagaatttgttccagaggagtgggtcccatatgttgggcaggctttaaacattttgcgggaagaggttaacaatgaagctgccgtgttgggctttgttggagctccctttacattggcatcctattgtgttgaaggaggttcatcaaaaaacttttcaaagattaagaaaatggccttctcagaaccagagattctgcataatttgctacagaaatttactacgtccatggctaactacattaaataccaagctgacaacggagcacaagctgtccaaatttttgactcatgggctacagaactcagcccagttgattttgaggagtttagcttgccttatctgaagcagattgtggatagtgtcaaagaaacacatcctgaattgcctctgatactatatgcaagtggatctggtggactgctggagaggcttccactgacaggtgttgatgttgttagcttggactggacggttgatatggctgaggggaggaaaagattgggatctaacatagcggttcaagggaatgttgaccctggcgttctttttgggtcaaaagagttcataagcaagcggatttttgacactgtgcagaaagctggtaatagtgggcatgtattgaaccttggtcatggcattaaggtaggcactcctgaggaaaatgttgcccatttctttgaggttgcaaaagggatcagatactga

SEQ ID NO: 452 - protein, 390 aa, Oryza sativa; identical to SEQ ID NO: 438

SEQ ID NO: 453 - DNA, 1020 bp, Ostreococcus taurii
atgctccgcgcgatcagaggcgaggacgtcgagcgtccaccgatctggatgatgcgccaagccgggagatacatgaaggtgtatcaggacctgtgcaagcggcacacgacgttccgagagcgaagcgagacggtggatctcgcggtggagatctctctgcagccgtatcgagcgtttaaaccggacggcgttattttgttcagcgatatcttgacgccgctgcaggggatgaacattccgttcgacatcgtgaaggggacgggaccgatcatcttcaacccggtgcgagagatggaggatatcaaggcgatcacgaatttggagcctgagaagagcgtgccgttcgtcggggagtcgcttaaattgttgaggagtgagattgggaacgaggccacgctattggggttctgtggtgcaccgttcacgctggcttcgtacatcgtcgagggtgggacgagctcgcattacaaggtgatcaaaaagatggcgtttgacgcgccggcggtgtacgaagcgctgatgaataagctcacggacgccgtgatcgagtacacgagataccaggcggacgctggggcgcaggtggtgcagatttttgattcctgggcgagcgaattctcaccagcggatttcgaaaagtactgcctcccatacctgcagcgcattgtggccgagtgcaagaagacacacccacacgtgccactcatcatttactccagcggtagcggcggattcctggagcgattggctacgacgaacgccgacgtcctgagcttggatggcaccgtggacatggcagatgctcgacggagactcggtgcaaaccaagcggtgcaggggaacatggaccccgtccacttgttcgcgtcgcaagacttcatcacgaagaaggttcatgaaacgatcgaaaaggccggtaagtccagacacgtcatgaatctcggccacggagtcatggtgggaacgcccgaagagaacgtcgctcacttcttccagacggtgcgcgactaccgctactga

SEQ ID NO: 454 - protein, 339 aa, Ostreococcus taurii
MLRAIRGEDVERPPIWMMRQAGRYMKVYQDLCKRHTTFRERSETVDLAVEISLQPYRAFKPDGVILFSDILTPLQGMNIPFDIVKGTGPIIFNPVREMEDIKAITNLEPEKSVPFVGESLKLLRSEIGNEATLLGFCGAPFTLASYIVEGGTSSHYKVIKKMAFDAPAVYEALMNKLTDAVIEYTRYQADAGAQVVQIFDSWASEFSPADFEKYCLPYLQRIVAECKKTHPHVPLIIYSSGSGGFLERLATTNADVLSLDGTVDMADARRRLGANQAVQGNMDPVHLFASQDFITKKVHETIEKAGKSRHVMNLGHGVMVGTPEENVAHFFQTVRDYRY

SEQ ID NO: 455 - DNA, 1185 bp, Ostreococcus taurii
atggtgccggcgacgcgggcggggacggtgacgcgcgcgacgacgaagggcgatgggcgcgcgtggacggggcgcggatgcgcgcgcgcgcgtcgatcgggcgcgacggtgacgcgcgcgaccgcgaacgggacgagcgatccgatcttgttgcgagcggcgagaggggaggacgtcgagcgctcgccggtgtggctgatgcgccaggctgggcggtacatggcggagtttcgcgcgtacagcacgaagtacgggtttcgacatcgctcggagacgccggagatcgcgatcgagctgtcgatgcaaccgtggcgggcgtataagcccgacggggtgattatgtttagcgatattctcaccccgctgcccgcgctcgggatcgagttcgacgtcgtcaaggggaaggggccggtcgtgcaccaggtgaagtccatggatgacgtgcgagcgatgaagactctggacgacccggagaagtctctgcctttcgttcgagagattttgagctcgctccgaaaggaaattgacggacagtccacgatgctcggtttcatcggctcgccttggacgctcgcggcgtatgccatggagggatcgagcgacaggcacctcgtcacgacgaagcaaatcatgacgcaaaatccagagttgctgcacgccttcttggacaagttggcggacgcacttggcgtgtacgtgtgctaccagatcgagagtggtgcgcaagtggtgcagatattcgactcctgggcgcaccacctctcgccgcagcaattcctcgagttttctcatccgtacaacgagcgcatcatcgcgtacgtgaaggaacgtcatccggaaacgccgctcatcttccacgccaacggtggatgtgggaagctcaatgagctcaaaaagtcgacggcggacgtcattgggttggattggaacacgagtatggtagacgcgcgggctgttctcggaccggatcgcgtgttgcaaggtaacatggatcccatgtacctcttcgcgagcccagagcgaattaagcaagaggtggcaaactgcgtgagagatgcgggcagcagtaagcacatcttgaatgtcggccatggtgtggtacaaggtacgccggaggagagcgttggtcacttctgcgacgcggcgcgcgcgtccgtgcataagaacgcaacactcgcgagataa

SEQ ID NO: 456 - protein, 394 aa, Ostreococcus taurii
MVPATRAGTVTRATTKGDGRAWTGRGCARARRSGATVTRATANGTSDPILLRAARGEDVERSPVWLMRQAGRYMAEFRAYSTKYGFRHRSETPEIAIELSMQPWRAYKPDGVIMFSDILTPLPALGIEFDVVKGKGPVVHQVKSMDDVRAMKTLDDPEKSLPFVREILSSLRKEIDGQSTMLGFIGSPWTLAAYAMEGSSDRHLVTTKQIMTQNPELLHAFLDKLADALGVYVCYQIESGAQVVQIFDSWAHHLSPQQFLEFSHPYNERIIAYVKERHPETPLIFHANGGCGKLNELKKSTADVIGLDWNTSMVDARAVLGPDRVLQGNMDPMYLFASPERIKQEVANCVRDAGSSKHILNVGHGVVQGTPEESVGHFCDAARASVHKNATLAR

SEQ ID NO: 457 - DNA, 966 bp, Ostreococcus taurii
atgatgcgacaagcggggagatacatgaaggagtatcgcgacctcgcggcgaagcacccgagctttcgggagcggagcgagaccacggatttgatcgtcgagatcacgatgcagccgtttcgggcgtttaaaccggatggagtgattttgtttagcgatatattgaccccgtttccggcgttcgggatcgatttcgagattgacgactacaaaggaccgatgctggagaagacgattacgaccgaggaggatttgaagatgcttcgcgaggtcgatctgtccaaggtggagttcgtcgccgacgcgctgaagattttgagacaagaggtcggagacgaagcggctgttctcgggttcgtcggcgcgccgtggacgctgtgcacgtacatcgtcgaggggaagtcgacgagcacgtacaaaaccatcaagtccatgtgcttcaccgctccggatgtcctgcgcacgctgttgtcgcacgtcgcggacgcgttggcggtgtacattggatttcaaatcgacgcgggggcgcaggttattcaaattttcgactcgtggggggggcaactgccgccgcacatgtgggaggagtggagcaagccgtacatcgagcgcgtcgtgaacaaggtgaagcaaacgcacccaggagtgccgatcacgctctacgccaacggttcgggcggactgttggagcgcatggcgactctcccggtggacaccatcggtttggactggacgatcgacatggaggacggtagacgccgcgtcggcgacaaggcggtgcagggcaacgtcgatccggtagttctcttcgccggggacgacgcgatcgaaaaggccgttcgggacgtgtgccgcaaggcgggcccgaccggacacgtcctcaacctcggtcacggcgtgctcgtgggaactcccgaagaggcggtcaagcacttcttcgacgtctccaagacgattacgtactga

SEQ ID NO: 458 - protein, 321 aa, Ostreococcus taurii
MMRQAGRYMKEYRDLAAKHPSFRERSETTDLIVEITMQPFRAFKPDGVILFSDILTPFPAFGIDFEIDDYKGPMLEKTITTEEDLKMLREVDLSKVEFVADALKILRQEVGDEAAVLGFVGAPWTLCTYIVEGKSTSTYKTIKSMCFTAPDVLRTLLSHVADALAVYIGFQIDAGAQVIQIFDSWGGQLPPHMWEEWSKPYIERVVNKVKQTHPGVPITLYANGSGGLLERMATLPVDTIGLDWTIDMEDGRRRVGDKAVQGNVDPVVLFAGDDAIEKAVRDVCRKAGPTGHVLNLGHGVLVGTPEEAVKHFFDVSKTITY

SEQ ID NO: 459 - DNA, 1002 bp, Physcomitrella patens
atgatgaggcaggcgggccggtacatggctgtgtatcgaaagcttgcggagaagcatccctcgtttcgagagaggtctgagaatgtggatttgatagtggagatttccttgcagccctggaaggcgttccgacctgatggagttataatattttcggatattctgacacctcttccggcaattggtatcccatttgagattgacgaagcgaaggggccacttcttgagacacccattgtgtctgaggaggggttggaagctcttcaccccattgatctcgacaaggtcaactttgtaggggagtccctcagcatcttgcgggaagaggtgggcgatggagcagcagtgttagggtttgtaggctcaccatggaccttggccacgtacattgtggaagggaagaccacccgcacttacacaaagatcaagagcatgacacatcaacagccagaattgctcaagtctattttatcccatttggcaaacgagattgctgagtacgttatattccaagtcaaagctggtgcacaatgtatacagatctttgactcttggggtgggcagcttcctcctcaccagtgggatcagtggtcgaagccctatattcagcagcttgtggccaaggtgagagacgcttgcccgggggtaccattggtgatgtacataaacgggaacggcggcttgctcgagaggatggctacagttgatgttgacgttataggacttgattggactatagatatggcagacgggcgaagacgactcggggactcgatagcagtgcaaggcaatgtggacccagctgttctctttgccccattacctgcaattactgaagcgattgaaagtgtggtgagcaaggcgggaactaatggtcatattcttaacctaggtcacggtgtccttgtgggcactcctgaggaaggcgtggctcatttttttgacactgcccgtagtctctcctatgaatctgctgtacttgcgacttcaagcttgtcgtag

SEQ ID NO: 460 - protein, 333 aa, Physcomitrella patens
MMRQAGRYMAVYRKLAEKHPSFRERSENVDLIVEISLQPWKAFRPDGVIIFSDILTPLPAIGIPFEIDEAKGPLLETPIVSEEGLEALHPIDLDKVNFVGESLSILREEVGDGAAVLGFVGSPWTLATYIVEGKTTRTYTKIKSMTHQQPELLKSILSHLANEIAEYVIFQVKAGAQCIQIFDSWGGQLPPHQWDQWSKPYIQQLVAKVRDACPGVPLVMYINGNGGLLERMATVDVDVIGLDWTIDMADGRRRLGDSIAVQGNVDPAVLFAPLPAITEAIESVVSKAGTNGHILNLGHGVLVGTPEEGVAHFFDTARSLSYESAVLATSSLS

SEQ ID NO: 461 - DNA, 1164 bp, Physcomitrella patens
atgcgtcgtagtggctctgtgcattgtaaaccctacgcgtgccgtgctactagcggtggggaggggagcgatgcgaggagcggcgcggagccgttgctgctgagagtggcgcgtggagaggaggcagagcggacgccggtgtggctcatgcggcaagctggacgctacatggccgattttcgcaagttttcggataggatttcgtttagggaaaggtccgagacggcagacattgcaattgagctctctttgcagccatggctagcattccgaaccgatggggttattatgttttccgacattcttacaccattgccagcccttggcatcgagttcaccatggtcaagggtaagggccccgtcattccttctcccgttcgtactctcgaagatatccagaacttgaggacgctagacgacccggaccagtctctccccttcataagacagatactctcgtcactgaggaaagaggtggaggggaaagctactttgataggattcatcggcactccgtggaccctcgccgcatatgccatggagggctcgtctgacaagaacctcatcaagacaaaaagtatcatgatgcacaaccctgagatcttgcatgcctttttagctcacctcacagatgctctcgtaacctacgtttgtcaccaaatcgactccggtgctcaaattgttcagctcttcgattcgtgggcgcaccatctctcccccgagcaattcagtgaatttagttggccttatgcagagcaattgatagatagggtgaagatcgctcgtcctgatgtcccattgatattccatgcgaacggtggaactggcaaactacatattgttgcacagaggaaacatcaggacgtcgtggtgggtctggattgggccactgaaatgcgagaagcgaggtcacttctcggcccgaagacagttctccaaggcaatgttgaccccatggttctttttggatctgaggatgtgattcgaagggctgctgagcagaacattagagacgcaggcggaaattatcacattctgaacgtcggccatggcgtcgttcagggtactcctgaagaatccgtgaagcttttctgtcaggtagctagggaaagcggtaaattgtcgccaaatgtaagtccttctgccgagcttctacaggtttag

SEQ ID NO: 462 - protein, 387 aa, Physcomitrella patens
MRRSGSVHCKPYACRATSGGEGSDARSGAEPLLLRVARGEEAERTPVWLMRQAGRYMADFRKFSDRISFRERSETADIAIELSLQPWLAFRTDGVIMFSDILTPLPALGIEFTMVKGKGPVIPSPVRTLEDIQNLRTLDDPDQSLPFIRQILSSLRKEVEGKATLIGFIGTPWTLAAYAMEGSSDKNLIKTKSIMMHNPEILHAFLAHLTDALVTYVCHQIDSGAQIVQLFDSWAHHLSPEQFSEFSWPYAEQLIDRVKIARPDVPLIFHANGGTGKLHIVAQRKHQDVVVGLDWATEMREARSLLGPKTVLQGNVDPMVLFGSEDVIRRAAEQNIRDAGGNYHILNVGHGVVQGTPEESVKLFCQVARESGKLSPNVSPSAELLQV

SEQ ID NO: 463 - DNA, 1236 bp, Physcomitrella patens
atggccaccaccgctgcttctctccctgctgccacctccagcgccgtttcgtccagctcttgcagagtttttgggaattcgcgtccgttgaagacgtcatggactggcgccaaggttttggccgtgaagcccaggactaagtgcgttgcgcaggctgttgctgctgaaattaaggaagctggggcgaatgtggacacatcctcagatcctctgctcctgagggcggtgcgcggtgaggaagtcgataggccgccggtgtggatgatgaggcaagctggccgatacatgaaggtgtatcaagatctatgtcagaaacaccctactttcagggagcgctctgagaatgtggatttggcagtcgagatttcattgcagccatggcgagcattcaaacccgacggagttattctattctcagacatcttgaccccatttaccggcatgaacatccccttcgatatcctgaagaccaagggccctatcattcataatcctattcggaccgctgccgacgtcgccaaagtgcgagagttggtacctgctgaagcggtgccgtatgtcggccaggctcttactgccttgcgtgaggaggtcggtaatgcttccacagttcttggatttgttggagcacccttcacgttggcatcctacatagtcgagggcggatcatctaaacatttcaccgtaatcaagaggatggctttcgagactcctgaggttctgcactctctacttcagaaacttgcggaatcggttatcatatacgtacgctatcaagctgattgtggtgcgcaagctgtccaaatctttgactcatgggcaacccacttgagtccagtagatttcgaggtgttcagcctgccctacatcaagcagattgtcagtgcagtgaagtccacccaccccgatctcccattgatcttgtatgcaagtggaagtggtggcctcttggagcggatggcttctacaggggttgacgtagtcagtgttgattggactgttgacatggctgaggccaggcagcgtattggtactcaactagctgttcagcagggtaatatggatcctgctgctctgtttggaaccaaggaattcatcgaaaggagaatacatgacactgttgctaaggccgggcggcacaaacatattctaaaccttggacatggtgtgttggtgggtacacctgaagagaatgtggcgcacttttttgaaacgggtaaaagcgtacgatattga

SEQ ID NO: 464 - protein, 411 aa, Physcomitrella patens
MATTAASLPAATSSAVSSSSCRVFGNSRPLKTSWTGAKVLAVKPRTKCVAQAVAAEIKEAGANVDTSSDPLLLRAVRGEEVDRPPVWMMRQAGRYMKVYQDLCQKHPTFRERSENVDLAVEISLQPWRAFKPDGVILFSDILTPFTGMNIPFDILKTKGPIIHNPIRTAADVAKVRELVPAEAVPYVGQALTALREEVGNASTVLGFVGAPFTLASYIVEGGSSKHFTVIKRMAFETPEVLHSLLQKLAESVIIYVRYQADCGAQAVQIFDSWATHLSPVDFEVFSLPYIKQIVSAVKSTHPDLPLILYASGSGGLLERMASTGVDVVSVDWTVDMAEARQRIGTQLAVQQGNMDPAALFGTKEFIERRIHDTVAKAGRHKHILNLGHGVLVGTPEENVAHFFETGKSVRY

SEQ ID NO: 465 - DNA, 1023 bp, Prunus persica
atgatgcgccaagcaggaaggtatatggccgtttacagaaagcttgcagagaaatatccatcattcagagagaggtcagagacaactgatctcattgtggaaatttctttgcagccttgggaagctttccatcctgacggagtgattattttctcagacatacttacccctctacctgcatttggtgtgctgtttgacatagaagacattcggggtcctgttatccagtcaccaattgtttctgaagagggtttgaagactttacatccaattgacttggataaacttcagtttgtgggggaatccttaaagatattgcggcaggaggttggcgggcaagctgctgttttgggttttgtaggggcaccttggacgattgctacatacatagtagaagggggttcaacttccacgtatacaacaataaagagcatgtgccatacagcaccacatgtattgagggctcttctttcgcatttgacacaggcaatatctgactatattgttttccaagtagaagcaggggctcattgtatacaaatatttgattcatggggtgggcaactaccaccaagcatgtgggatagctggtcgaagccatatattcaagagatcgtgagttcagttaggaaaagatgccctaaaacaccacttgttctgtacattaatgggaatggcggccttcttgagcgtatgaaaggaactggagtagatgtgattgggcttgactggacggtggacatggcagatggtagaaaacgattgggtagtgagatcagtgtacagggaaatgtggaccctgcttacctattttctcctcttccatccctgactgaagaaattctaagggtggtgaggtctgcagggccaaggggacacattctcaatctagggcatggtgttcttgtacggacacctgaagaatccgttagacatttctttgaagttgcaagaagcttgaattatgatacatttctacaaacacaaacaccgaccgaaggaattggtagtttagtgatataa

SEQ ID NO: 466 - protein, 340 aa, Prunus persica
MMRQAGRYMAVYRKLAEKYPSFRERSETTDLIVEISLQPWEAFHPDGVIIFSDILTPLPAFGVLFDIEDIRGPVIQSPIVSEEGLKTLHPIDLDKLQFVGESLKILRQEVGGQAAVLGFVGAPWTIATYIVEGGSTSTYTTIKSMCHTAPHVLRALLSHLTQAISDYIVFQVEAGAHCIQIFDSWGGQLPPSMWDSWSKPYIQEIVSSVRKRCPKTPLVLYINGNGGLLERMKGTGVDVIGLDWTVDMADGRKRLGSEISVQGNVDPAYLFSPLPSLTEEILRVVRSAGPRGHILNLGHGVLVRTPEESVRHFFEVARSLNYDTFLQTQTPTEGIGSLVI

SEQ ID NO: 467 - DNA, 1176 bp, Pinus taeda
atggcttccatccattgcctctggccacgcttgtacataattcatcatccatcatcaaatggcatgcccacttctccacggctcaaatccagagtccattgtgccatgacagagtctgttgccaaagcaaaccctagtactactgctgaaccactcctccttcgtgttgtccggggagaaacagtggaaaggcctcctgtttggcttatgagacaagcagggagatacatgaagagctatcaacaattatgcgagaagtaccccttattccgtgaaaggtcagaaaacgttgatcttgcagttgaaatctctttgcaaccatggaaagctttcaagccagatggagttattttgttctcggacatacttactcctttgacaggaatgaatattccttttgatatagttaaaggaaaaggtccagttatttataagccaatccagactttagctgatgtggctgacgttcaagagtttatcccacaggagtcagtgccatatgttggtgaggcactgtcaattttgcaagcagaggtaaacaatgaagctgcagttctaggatttgtaggagctccatttactctggcttcatatgttgtagaaggtggatcttcaaagcactttgcaaaaattaagcatatggcattctgtatgcccaaggttctgcatgcactgctgcatatatttgcagagtctatggcgaattacatttgctatcaagcagacaatggagctcaagtggtccagatttttgactcttgggcaacagagcttagtccagtggattttgaagaattcagtcttccttacttgaagtacattgtggagtctgtgaaaaaaacccaccccaacttgcccctaattctttatgccagtggatctggaggattgctagaaaggcttccgttatctggtgttgatgttattagtctggactggacagttgatatcgcagaagctagaagaagaataggattagatattgcagtgcagggtaatgttgatcctggtgcactctttggatccaaggacttcattacaaaacgaatttatgacacagtgtctaaagcaggaaataaaaaacacattcttaatctagggcatggtgtgctattaggcacaccagaggataatgttgctcatttttttgaggtggcaaaagggatcagatattag

SEQ ID NO: 468 - protein, 391 aa, Pinus taeda
MASIHCLWPRLYIIHHPSSNGMPTSPRLKSRVHCAMTESVAKANPSTTAEPLLLRVVRGETVERPPVWLMRQAGRYMKSYQQLCEKYPLFRERSENVDLAVEISLQPWKAFKPDGVILFSDILTPLTGMNIPFDIVKGKGPVIYKPIQTLADVADVQEFIPQESVPYVGEALSILQAEVNNEAAVLGFVGAPFTLASYVVEGGSSKHFAKIKHMAFCMPKVLHALLHIFAESMANYICYQADNGAQVVQIFDSWATELSPVDFEEFSLPYLKYIVESVKKTHPNLPLILYASGSGGLLERLPLSGVDVISLDWTVDIAEARRRIGLDIAVQGNVDPGALFGSKDFITKRIYDTVSKAGNKKHILNLGHGVLLGTPEDNVAHFFEVAKGIRY

SEQ ID NO: 469 - DNA, 1212 bp, Populus tremuloides
atgtcttccatttgcagctttacttcctccatttcctcaatctctccttttacatctccaagaaagtctctcaactataacaacaagtacactccaatcatccactcttcccttcaaggaactgtggccgaacctaaagcatcctctgttgccgagccccttttgcttaatgccgttagaggagaagatgttgaaagacctcccgtttggcttatgaggcaagcagggaggaactggtttacaagctatgcacatgtcagctttaaaatgagttaccaaatcatctgtgagaagcatccttcatttcgtgaaagatcagaaaatgttgatcttgtagtggaaatttctctacagccatggaaagttttcaggcctgatggagtcattttattctctgacattcttacaccactttctgggatgaatatcccttttgacattgtgaaaggcaagggtcctgtcatattcaatcctttgcgcacagctgatgatgttgatcaagttagggaatttgttcctgaggaatcagttccatatgtcggggaagcattgacagtcctgagaaaagaggtagaaaacaaagctgcagtgctgggcttcgtaggggctcctttcaccctggcttcatatgtagtggaaggtggttcatcaaaacactttactaaaataaagagattagctttctcccagcccaaggttctccacgcattacttcagaaatttgcgacctctatggcaaaatacattcaatatcaagctgacagtggagctcaaactgttcaaatctttgactcatgggccacagagcttagccctgtggattttgaggagttcagtcttccatacttgaagcagatcgtggatactgtgaaacaatcccatccaaatctcccgctaatcctttatgctagtggatctggaggcttgcttgagcggctagctttgacaggtgtagatgttgtaagcttggattggtcagttgatatggctgaaggtaggaagcgattgggacctgatgtagctgttcaggggaatgtagatcctggtgttctatttgggtcaaaggaattcataactaatcggatatatgatgttgtcaagaaagccggtaaaggaaaacatatacttaatcttggtcatggaattgtagtcggcacacctgaggagaatgttgcgcactttttcgaggttgctaaaggaatcagatactaa

SEQ ID NO: 470 - protein, 403 aa, Populus tremuloides
MSSICSFTSSISSISPFTSPRKSLNYNNKYTPIIHSSLQGTVAEPKASSVAEPLLLNAVRGEDVERPPVWLMRQAGRNWFTSYAHVSFKMSYQIICEKHPSFRERSENVDLVVEISLQPWKVFRPDGVILFSDILTPLSGMNIPFDIVKGKGPVIFNPLRTADDVDQVREFVPEESVPYVGEALTVLRKEVENKAAVLGFVGAPFTLASYVVEGGSSKHFTKIKRLAFSQPKVLHALLQKFATSMAKYIQYQADSGAQTVQIFDSWATELSPVDFEEFSLPYLKQIVDTVKQSHPNLPLILYASGSGGLLERLALTGVDVVSLDWSVDMAEGRKRLGPDVAVQGNVDPGVLFGSKEFITNRIYDVVKKAGKGKHILNLGHGIVVGTPEENVAHFFEVAKGIRY

SEQ ID NO: 471 - DNA, 1230 bp, Phaeodactylum tricornutum
atgaaagtgtcccacgtcgctttcagcctgttcctggctggttcccaaacgactgcctttactaatccggtatccaactcggcgaaacaacaatcgttccgtcttccaagttcggcatcgtcggcagcggatacgacctcctcggccaatgtcgctcaaaagagcacgcaagatccgttgcttattcgggcggctcgtggtgaaaaaacagaacgcactcctgtttggatgatgcgacaagctggtcgccacattgcggaataccgggacttgtgcaaaaagtaccccacctttcgcgaacgttccgaaattccggaagtcgccgttgaagtctcgctgcagccttggcgcaattaccagactgatggatgcattctcttttccgatattttgactcctttgccaggtattggatgtgaatttaccattgatgaaaaagttggtcctcttatggaaccgatgcgctcctacgatgacatcaaaaagatgcaccccatggacccatacaagtccacgccatttgtcgccgaagctctcaaggctttgcgccaagaagttggtccggaaactgctgtattaggctttgttggatgcccttatacactggcaacatacattgtggaaggcaaaacatccaaggaatacctggaaattaagaaaatggccttgaacgaacctgatcttcttcacgctattctgcaacaattggcggacaacattggagactacgcccttttccagattgagaacggcgcccagctgattcagatttttgattcttgggccggacatctatcaccccgggactacaatacttttgcagctccttaccaaaagcaaattcttgacaaaattaaggaaaagtaccctgacgtcccgacggtcatttacatcaagcactcaggtgcattgattgaacgcatggcggcgacgggcgtagatgtcgtttcgttagactggactgtcgatatggcggacgggcgtgatcgcatcgaggccggacgcaagtccgctggtcttgaaggacgtgggggtgtacaaggaaacttggatccagccgttttattcgccaatcacgatgttattgaagaacgagcgattgaaattctcaaaaaagcaggcagcgttgggcatgtcatgaacttggggcatggtattgaagccgctacaccagaagaaaacgcacaccattttattgaaactgtcagaggctatcgtcatgaggagtag

SEQ ID NO: 472 - protein, 409 aa, Phaeodactylum tricornutum
MKVSHVAFSLFLAGSQTTAFTNPVSNSAKQQSFRLPSSASSAADTTSSANVAQKSTQDPLLIRAARGEKTERTPVWMMRQAGRHIAEYRDLCKKYPTFRERSEIPEVAVEVSLQPWRNYQTDGCILFSDILTPLPGIGCEFTIDEKVGPLMEPMRSYDDIKKMHPMDPYKSTPFVAEALKALRQEVGPETAVLGFVGCPYTLATYIVEGKTSKEYLEIKKMALNEPDLLHAILQQLADNIGDYALFQIENGAQLIQIFDSWAGHLSPRDYNTFAAPYQKQILDKIKEKYPDVPTVIYIKHSGALIERMAATGVDVVSLDWTVDMADGRDRIEAGRKSAGLEGRGGVQGNLDPAVLFANHDVIEERAIEILKKAGSVGHVMNLGHGIEAATPEENAHHFIETVRGYRHEE

SEQ ID NO: 473 - DNA, 1296 bp, Phaeodactylum tricornutum
atgagattctctagtacctcggtttggacgattgcactattggcggtgagcagtagtccaacggcgatgaccaatgcttggatgacgacaccagtaacgtcctcgtcctcgtcgcatcttcgtactaccaccaaccggactcccctgcgcttgtcctcctccagcgcgacaacgactgccgcggcggacgaacgcgtggtgtggggcaaggtcaaatcgcacgaccattgccgagaaccacacgatcgcgacattttggtgcgggccgcccgcggggaaaccgtcgaacgcacaccggtatggatgatgcgtcaagcgggtcggtacatggaagccttccgcgagtactccgacgttttgccctttcgggaacgctcggaaacgcccgattatgccgtggagctctcactacaatgtcaccgggcttacggcatggacggcatcattatgtttagcgatattctcacgccgctaccgactctgggtatcgactttgatgtcgtcaaagggaccggaccggttattaccaccaaggttcggaccgaagaagacgtcaacaatatgccacgccacgaattcgacgacaaggttccctttattaaggaaatattgaatcgtctctcacaagaagccgaggacgccaacacatcgttgattggctttgtcggcgcaccctttacgctcgccgcctacactattgaaggaaagtcgtccaaggactgcttgacgaccaaaaagcttctcatggcggacgaacgtggcgataatgcctgcatcagtttgtttttggacaaacttgccgatatgattggcgactacgcctgctaccaaatcgagcacggcgcacaagtcattcaggtcttcgaatcctgggcacaccaattgtccccacactggttcgaaacgtacgccaagcctgctgcgcaaaaggccattcgtaaaatcaagagccaatacccggacactcccgtcatttactttgccaacggcggatcatcttacttggaattgcaacgagatatgggtgccgacatgattgccgtcgactgggcggtcaacttatcccaggcccgcaccattctgggacccgatgtgcccgtttcgggcaatctcgatccgaccgtgttgttcggtagtaaagagcagatcgagcaggctgtacgggattgtattgatcaagccggtgggccaggaagacatcttctcaaccttggccacggcgtcatgcaagggacaccagaagaggccgtgaaatggctggtggatgaagtcaaacggtacaagggtaaagcgtaa

SEQ ID NO: 474 - protein, 431 aa, Phaeodactylum tricornutum
MRFSSTSVWTIALLAVSSSPTAMTNAWMTTPVTSSSSSHLRTTTNRTPLRLSSSSATTTAAADERVVWGKVKSHDHCREPHDRDILVRAARGETVERTPVWMMRQAGRYMEAFREYSDVLPFRERSETPDYAVELSLQCHRAYGMDGIIMFSDILTPLPTLGIDFDVVKGTGPVITTKVRTEEDVNNMPRHEFDDKVPFIKEILNRLSQEAEDANTSLIGFVGAPFTLAAYTIEGKSSKDCLTTKKLLMADERGDNACISLFLDKLADMIGDYACYQIEHGAQVIQVFESWAHQLSPHWFETYAKPAAQKAIRKIKSQYPDTPVIYFANGGSSYLELQRDMGADMIAVDWAVNLSQARTILGPDVPVSGNLDPTVLFGSKEQIEQAVRDCIDQAGGPGRHLLNLGHGVMQGTPEEAVKWLVDEVKRYKGKA

SEQ ID NO: 475 - DNA, 807 bp, Ricinus communis
atgtcttgcatttgtagcattagctcaatttcttctttctctactctctactcttctccaagaaaatcagtatctaaacctccaattatccactgttcccttccagggactgtggctgaacccaagcctgcctctgtagctgaacctttattgcttaatgctgttagaggagaagatgttgaaagacctccagtttggcttatgaggcaagcagggaggtacatgaagagttaccaaataatttgtgagaagtatccttcatttcgtgaaagatcagaaaatgttgatcttgtggtggagatttctctacagccttggaatgtcttcaagccagatggggtcattttattctcagacattcttacaccactatctggaatgaatatacctttcgacattgtgaaaggtaaaggccctattatattcaaccctttacgcactgctgaagatgttgatcaagtgagagaatttgttccggaggagtcagttccatatgttggagaatcattgacaatcctgcgaaaagaggtagataacaaagctgcagtgcttggttttgttggcgctcctttcaccctggcatcatattgtgttgaaggcggttcgtcaaaacacttctcaaaaataaaaagattagctttctcccagcccgaggttcttcatgcactgcttcagaagtttgcaacttccatggcaaagtatgttcaatatcaagctgacaatggagctcaagctgttcagatctttgactcatgggccacagaacttagccctgttgatttgagcagttcagtcttccatacttga

SEQ ID NO: 476 - protein, 268 aa, Ricinus communis
MSCICSISSISSFSTLYSSPRKSVSKPPIIHCSLPGTVAEPKPASVAEPLLLNAVRGEDVERPPVWLMRQAGRYMKSYQIICEKYPSFRERSENVDLVVEISLQPWNVFKPDGVILFSDILTPLSGMNIPFDIVKGKGPIIFNPLRTAEDVDQVREFVPEESVPYVGESLTILRKEVDNKAAVLGFVGAPFTLASYCVEGGSSKHFSKIKRLAFSQPEVLHALLQKFATSMAKYVQYQADNGAQAVQIFDSWATELSPVDLSSSVFHT

SEQ ID NO: 477 - DNA, 1185 bp, Sorghum bicolor
atggcgacggcgtgcccgccgctctcgctgccgtccacctccctcttccgcggcaggtccgcccgcgccgggcccagacgccggcagctctccgccgtccgctgcagcgccgtcggagaggcggtagtggaggaggcctcgctcgggacggcggaggagccgctgctggtgagcgcaatcagagggaggaaggtcgacaggccacccgtatggctcatgaggcaggccgggaggtacatgaagagctaccaatcgctctgcgagcgatatccttcgttccgtgaaagatcagaaaatgtcgaccttgttgttgagatctctttgcaaccatggaaggttttcaagcctgacggagtcatcttgttctcggatatccttactccacttcctgggatgaacatacctttcgacattgtgaagggaaaaggtccagtgatctatgatcctttgagaacagcagctgctgttaatgaagtcagagaatttgttcctgaggagtgggtcccttatgtggggcaggctctgaatttgttgcgagaagaggttaagaatgaagctgctgtactaggttttgttggagctccgtttaccttggcatcttattgtgtggaaggaggttcatcaaagaactttacaatgattaagaaaatggccttctcagaaccagcgattctacataatttgctacaaaagttcacaacatcgatgtctaactatattaaataccaagcggacaatggggcgcaggctgtccaaatttttgattcatgggccactgaactcagcccggctgattttgaggagtttagccttccttatctaaagcagatagtggatagtgttaaggaaacacatcctaacttgcctctgatactatatgcaagtggatctgggggcttgctggagaggcttcctttgacaggtgttgatgttgtcagcttggactggacagttgatatggcagagggcaggaaaagattgggatctaacatagcagttcaagggaatgtggaccctggtgttctttttggatccaaagagtttataagcaagcggatttacgacactgtgcagaaggctggcaatgttggacatgtattgaaccttggccatggcatcaaggttggaactccagaggaaaatgttgctcacttctttgaggttgcaaaagggataagatactaa

SEQ ID NO: 478 - protein, 394 aa, Sorghum bicolor
MATACPPLSLPSTSLFRGRSARAGPRRRQLSAVRCSAVGEAVVEEASLGTAEEPLLVSAIRGRKVDRPPVWLMRQAGRYMKSYQSLCERYPSFRERSENVDLVVEISLQPWKVFKPDGVILFSDILTPLPGMNIPFDIVKGKGPVIYDPLRTAAAVNEVREFVPEEWVPYVGQALNLLREEVKNEAAVLGFVGAPFTLASYCVEGGSSKNFTMIKKMAFSEPAILHNLLQKFTTSMSNYIKYQADNGAQAVQIFDSWATELSPADFEEFSLPYLKQIVDSVKETHPNLPLILYASGSGGLLERLPLTGVDVVSLDWTVDMAEGRKRLGSNIAVQGNVDPGVLFGSKEFISKRIYDTVQKAGNVGHVLNLGHGIKVGTPEENVAHFFEVAKGIRY

SEQ ID NO: 479 - DNA, 1215 bp, Sorghum bicolor
atgatgcctccgacggccaccgcgacggccgtcttcctctccgcggcgcccccctctttctcaacccgccgtcggcgcagccgccttcctgccatctccgcatccctttcgccgtcctcctcctcttcctcctccgaggagccgctgctggtgcgcgcggcgcggggcgaggacgggctcccgcgcccgcccgcgtggatgatgcggcaggcggggcggtacatggcggagtaccaggcgctggccaagcgccacccctcgttccgggagcgctccgagaacacggacctcatcgtcgagatcacgctgcagccgtggcgtgccttcgcgcccgacggcgtcatcctgttctcggacatactcacgcccctgccggccatcggggtgcccttcgatatctccgactccaaggggcccgtgatccaatccccagtgcggtccgaagagcaggtgagggagctcgtccccatcgaccttgatatgctccagttcgtcggggagtcgctaaagattctgcgaaatgagattgatggaaaagctgctttgctaggatttgtgggggccccatggacaattgcaacttacgttgttgaaggggggatgaccaacacatacacaaatataaagagcatgtgccatacagctccagatgtcttgaggagtcttctttctcaccttgcacaagcgatatctgactatatcatttaccaagttaactctggggcccagtgtatacagatatttgattcatggggtggacaacttccacctcatgtgtgggagcagtggtcaaaaccatatatcaaacagattgtgagtaggattaagaaagagtgccctcatgtaccccttgtgttgtatataaatggaaatggaggtttacttgagcgcatgaaggacacaggagttgatgttattgggcttgactggacagtggacatgtctgatggaaggaggcgccttggtaatggaattagtgtacaagggaatgtggatccagcatttctgttctcaccattaccagtactgactgatgaaattcatagggttgtgaaatcagctggtccaaaaggtcatatacttaacctgggccatggtgtacttcagaaaacacctgaagaagctgtagcacatttctttgatgtcacaaggagcttgagatatgacacccttttccaaggttctgttgccgaagaactgcagcctgttgcttga

SEQ ID NO: 480 - protein, 404 aa, Sorghum bicolor
MMPPTATATAVFLSAAPPSFSTRRRRSRLPAISASLSPSSSSSSSEEPLLVRAARGEDGLPRPPAWMMRQAGRYMAEYQALAKRHPSFRERSENTDLIVEITLQPWRAFAPDGVILFSDILTPLPAIGVPFDISDSKGPVIQSPVRSEEQVRELVPIDLDMLQFVGESLKILRNEIDGKAALLGFVGAPWTIATYVVEGGMTNTYTNIKSMCHTAPDVLRSLLSHLAQAISDYIIYQVNSGAQCIQIFDSWGGQLPPHVWEQWSKPYIKQIVSRIKKECPHVPLVLYINGNGGLLERMKDTGVDVIGLDWTVDMSDGRRRLGNGISVQGNVDPAFLFSPLPVLTDEIHRVVKSAGPKGHILNLGHGVLQKTPEEAVAHFFDVTRSLRYDTLFQGSVAEELQPVA

SEQ ID NO: 481 - DNA, 1263 bp, Solanum lycorpersicum
atggctatggctttttctccattaacaacaagtgggtgtagtagttattgcaatcttggattaagctggaaatcatcgagcttgtttgtggaattagggtttgtttcaaatgggtcaaaaggggtttctgctaaacccgcaaagctcaatgctagtaaagtttttcgggcatgtgcttcttcttctaactctgatcctcttttggtgaaggctgcaagaagagaacgggtgagtcgcccacccgcttggatgatgcgtcaagcgggaaggtatatggctgtttaccgaaagcttgcggagaaacatccatccttcagagagagatcagagacaactgatctcattgtggaaatttctttgcagccctgggaagcttttcatccagatggtgtaatcatcttttcggacatacttaccccgctacctgcatttggtgtccaatttgacattgaagatgtaagaggcccagtcattcagtctcccattcgttctgaagagggattgaaagcattgcactccattgacttggagaaactacaatttgtgggagactcacttagtattttgaggaaggaggttggagaacaagctgcaattttgggttttgtcggagcgccttggacaattgctacctacatagttgaaggaggtacaactcgtacatatacgaagattaaggacatgtgccataccgctcctcatgttttgagagctttgttatctcatttatcaaaagcaattgctgagtatattgtgtatcaagtggagtctggagctcattgcatccagatatttgattcatggggtggacaactcccacctcatatgtgggactgctggtcaaagccttatattgatgagatagttggtataattaaaagaaagtgcccacaaacacctcttgtgctctacattaacggaaatggtggacttcttgaacggatgaaaacaactggagttgatgtaattggacttgactggacagttgatatggcagatggaaggcggcgactaggaacagatattggtatacaggggaatgtggatcccgctaccttgttttgtcctcttcctgcattgacagatgaaattaaaagggttgtcaagagtgcagggagtagtggtcacatcctcaatcttggccacggtgtgctcgtgggtacgcctgaagaagccgtagctcacttctttgatgttgctaagagtttcgattttgacaaggttgaagatcatgtatctgaggcagataaagttgtagcttga

SEQ ID NO: 482 - protein, 420 aa, Solanum lycorpersicum
MAMAFSPLTTSGCSSYCNLGLSWKSSSLFVELGFVSNGSKGVSAKPAKLNASKVFRACASSSNSDPLLVKAARRERVSRPPAWMMRQAGRYMAVYRKLAEKHPSFRERSETTDLIVEISLQPWEAFHPDGVIIFSDILTPLPAFGVQFDIEDVRGPVIQSPIRSEEGLKALHSIDLEKLQFVGDSLSILRKEVGEQAAILGFVGAPWTIATYIVEGGTTRTYTKIKDMCHTAPHVLRALLSHLSKAIAEYIVYQVESGAHCIQIFDSWGGQLPPHMWDCWSKPYIDEIVGIIKRKCPQTPLVLYINGNGGLLERMKTTGVDVIGLDWTVDMADGRRRLGTDIGIQGNVDPATLFCPLPALTDEIKRVVKSAGSSGHILNLGHGVLVGTPEEAVAHFFDVAKSFDFDKVEDHVSEADKVVA

SEQ ID NO: 483 - DNA, 1167 bp, Solanum lycorpersicum
atgtcttgtatttacagttcagtctcttctttctcaatttcatctaaatcgtcttcttcttctcgctctaaattcaagcccagaatctcttgttccgttggaggaactgttgctgaaccaaaaactataaatgcaacagagcctttgttgcttgatgctgttcggggtaaagaagtagaaaggcctcctgtttggcttatgagacaagcagggaggtacatgaagagttatcaaatcttatgtgagaagcacccatcctttcgtgagagatcagaaaatgtagatcttgtggtagaaatttctctgcagccatggaaagtattccagcctgatggggtcattttgttttcagatattcttactcctctctctggtatgaacatcccttttgacattataaaggggaagggtcctgtcatatttgatccaccgaccacactttctgatgttgagaaagttagagaatttattcctgaagaatcagttccatatgttggagaagcattaacaattttgcggaaagaggtaaataatcaagcagcagttctgggtttcgttggggcaccatttacgttggcttcatatgtggttgaaggtggttcctctaagaactttacaaaaattaagagattagcttttgcggagcccaaggtccttcattcgctgcttcaaatatttgcaacctcaatggctaaatatatccgttatcaagctgaccatggagctcaagcagttcagatctttgattcatgggccacagagctaagcccagtcgattttgaggagttcagtctaccatacttaaaacagatagttgaggcagtgaaactaacccatcctgatctccctctgattctttatgcaagtggatcaggtggcttgcttgagagactacccttgacaggagtagatgtagtcagtttggactggacagttgatatggctgatggtaggagacgactgggtcctaatgtggctatacaaggtaatgtggatcctggagttctctttggctccaaggaatttattaccaaccggataaatgatacagtgaagaaagctggtaaagggaaacatattttgaaccttggacatggcatcaaagtaggtacacctgaggaaaatgttgctcacttctttgaggttgctaaaggtcttaggtattag

SEQ ID NO: 484 - protein, 388 aa, Solanum lycorpersicum
MSCIYSSVSSFSISSKSSSSSRSKFKPRISCSVGGTVAEPKTINATEPLLLDAVRGKEVERPPVWLMRQAGRYMKSYQILCEKHPSFRERSENVDLVVEISLQPWKVFQPDGVILFSDILTPLSGMNIPFDIIKGKGPVIFDPPTTLSDVEKVREFIPEESVPYVGEALTILRKEVNNQAAVLGFVGAPFTLASYVVEGGSSKNFTKIKRLAFAEPKVLHSLLQIFATSMAKYIRYQADHGAQAVQIFDSWATELSPVDFEEFSLPYLKQIVEAVKLTHPDLPLILYASGSGGLLERLPLTGVDVVSLDWTVDMADGRRRLGPNVAIQGNVDPGVLFGSKEFITNRINDTVKKAGKGKHILNLGHGIKVGTPEENVAHFFEVAKGLRY

SEQ ID NO: 485 - DNA, 1017 bp, Selaginella moellendorffii
atgatgcgtcaggccgggcgatacatggcagcgtatcgcaaattggcagacaagcatccctccttccgcaagagatccgaggagacggatcttatcgtcgagatttcgctgcagccctggaaagcattcatgcccgacggcgtcatcatcttctccgacatcctcactccactccccgcgattggagtggagtttgagatcgatgacgccaaaggcccgatcatcagcgacccagtcgtgtcggtggagcgagcatcgcagctgcattccatcgatctctcacgcctcgagttcgtcggcgactcgttgagaactcttcgaagagaggtagggaatggagctgctgttcttggattcgtcggtgcgccgtggacgctggcaacttatctcatcgagggccgctccactcgaacttacaagaagatcaaaggcatgtgttacgagaatccggagctgctcgagtcgatactcgaccaccttgcaaatgcgatcggggactacctcgtgtttcagatacaatccggtgctcagtgcgtccaaatatttgattcctggggtggccaacttacgccagttcaatgggatcgctggtcaaaaccgtatatttgcaagatgatcaggactgtcaaggacaagtgtcctggagttccgatcgtcctctatgcgaatggaaacgggggcctcctggaaagaatgagtgacaccggagctcatgtcatcggcctggattggacagtagacatgctggatggtcgaaagaggctgggagattccgtggctgtccagggaaatgtggatccctgcgttcttttcggtccggaatggtcgatcaccgaagccgtggtcgacgtcgtgagaaaggctggaaacaagggtcacatcctcaatctgggacacggcgtcttggttggcaccccggaagagagtgtcgcacatttttttcaaacggcacggagcctgtcgctggacaagctgggctctttatctgcacaatttgcagcagcagcagcatcgtga

SEQ ID NO: 486 - protein, 338 aa, Selaginella moellendorffii
MMRQAGRYMAAYRKLADKHPSFRKRSEETDLIVEISLQPWKAFMPDGVIIFSDILTPLPAIGVEFEIDDAKGPIISDPVVSVERASQLHSIDLSRLEFVGDSLRTLRREVGNGAAVLGFVGAPWTLATYLIEGRSTRTYKKIKGMCYENPELLESILDHLANAIGDYLVFQIQSGAQCVQIFDSWGGQLTPVQWDRWSKPYICKMIRTVKDKCPGVPIVLYANGNGGLLERMSDTGAHVIGLDWTVDMLDGRKRLGDSVAVQGNVDPCVLFGPEWSITEAVVDVVRKAGNKGHILNLGHGVLVGTPEESVAHFFQTARSLSLDKLGSLSAQFAAAAAS

SEQ ID NO: 487 - DNA, 1182 bp, Selaginella moellendorffii
atggcgacgacgtctggatgcttggtcgggcaatgcaggcccggcgcggccgctgttcaatggaattcctcgcgcccatcgaggatccagtgctccgtcgtggcggatgcggctacagcgacggattcacagcaggagctccgggcaggcgcagatcctttgttgctacgagcagtgcgcggcgacagcgtcgagaggcctcccgtgtggatgatgcggcaagccgggaggtacatgaagtcttatcaagacctctgtgccaaatatccttcttttagagagcgatcagagaatgcggagcttgccattgagatctcgctccagccatggaaggcttttaggccagatggtgtgattttgttctcggacatcttgacacccttgacgggaatgaacattccatttgatatcctagccgggaagggacccgttatacacaaaccgatcacatccatggccgatgtagacgaagttacggagctctgtcccgaggaggccgtcccttacgttggacaagctctatcctctctcagagctgaagtgggcaatgaggctgctgtgctgggctttgttggcgcaccattcacactagcctcgtatatcatagaaggaggctcatccaagcatttcgcgaagataaaaagactagcctttggcagccctgagattttacacgctttgctcaagaaactggccgagtccataatcatctacgtgcgttaccaggcagacaagggagctcaaaccgtccaaatcttcgactcgtgggccacgcacctaagcccgatcgatttcgagcaattcagcctgccatatctcaagcagatagtgtccgaggtgaagaaaactcacccgtcgctaccattgatcctctacgccagcggcagcggcggcctcctcgagaggctggggtcgtccggagtggacatcgtgagcgtggactggacagtggacatggccgaggcgaggcaaagattaggcagggacgtagcggtgcaaggcaacatagaccccggcgccttgtttggctccaaggattttatccggcaaagagttatcgacaccgtggccagggctggccgaggaaagcacattctaaaccttggccatggagtgttggttgggacgcccgaggagaacgtagctcacttcttcgaagttggaaaaagcattcgatattga

SEQ ID NO: 488 - protein, 393 aa, Selaginella moellendorffii
MATTSGCLVGQCRPGAAAVQWNSSRPSRIQCSVVADAATATDSQQELRAGADPLLLRAVRGDSVERPPVWMMRQAGRYMKSYQDLCAKYPSFRERSENAELAIEISLQPWKAFRPDGVILFSDILTPLTGMNIPFDILAGKGPVIHKPITSMADVDEVTELCPEEAVPYVGQALSSLRAEVGNEAAVLGFVGAPFTLASYIIEGGSSKHFAKIKRLAFGSPEILHALLKKLAESIIIYVRYQADKGAQTVQIFDSWATHLSPIDFEQFSLPYLKQIVSEVKKTHPSLPLILYASGSGGLLERLGSSGVDIVSVDWTVDMAEARQRLGRDVAVQGNIDPGALFGSKDFIRQRVIDTVARAGRGKHILNLGHGVLVGTPEENVAHFFEVGKSIRY

SEQ ID NO: 489 - DNA, 699 bp, Saccharum officinarum
atgatgcccccgacggccaccgcgatggccgtcgtcctctccgcggcggccccctctttctccacccgccgtcggcgcagccgccttcctgccatctccgcatctctttcgccgtcctcctcctcctcttcctcctccgaggagccgctgctggtgcgcgcagcgcggggcgaggacggcctcccgcgcccgcccgcgtggatgatgcggcaggcagggcgatacatggcggagtaccaggcgctggccaagcgccacccgtcgttccgggagcgctccgagaacacggacctcatcgtcgagatcacgctgcagccgtggcgtgccttcgcgcccgacggcgtcatcctgttctcggacatactcacgcccctaccggctatcggggtgccgttcgatatctcggactccaagggacccgtgatccaatcgccagtgcggtccgaagagcaagtgagggagctcgtccccatcgaccttgatatgctccagttcgtcggggagtcactaaagattctgcggaatgagattgatggaaaagctgctctgctaggatttgtgggggccccatggacaattgcaacttatgttgttgaaggggggatgaccaacacatacacaaatataaagagcatgtgtcatacagcttcagatgtcttgagggggcttctatctcacccttgcacaaccaatatctga

SEQ ID NO: 490 - protein, 232 aa, Saccharum officinarum
MMPPTATAMAVVLSAAAPSFSTRRRRSRLPAISASLSPSSSSSSSSEEPLLVRAARGEDGLPRPPAWMMRQAGRYMAEYQALAKRHPSFRERSENTDLIVEITLQPWRAFAPDGVILFSDILTPLPAIGVPFDISDSKGPVIQSPVRSEEQVRELVPIDLDMLQFVGESLKILRNEIDGKAALLGFVGAPWTIATYVVEGGMTNTYTNIKSMCHTASDVLRGLLSHPCTTNI

SEQ ID NO: 491 - DNA, 1263 bp, Solanum tuberosum
atggctatggttttttctccattaacatcaagtgggtgtagtagttattgcaatcttggattaagctggaaatcgtcgagcttgtttgtggaattagggtttctttcaaatgggtcaaaaggggtttctgctaaacccgcaaagctcaatgctagtaaagtttttcgggcttgtgcttcttcttcttcctctgatccacttttggtgaaggctgcaagaagagaacaggtgagtcgcccgcctgcatggatgatgcgtcaagcgggaaggtatatggctgtttacagaaagcttgcggagaaacatccatccttcagagagagatcagagacaactgatctcattgtggaaatttctttgcagccctgggaagcttttcatccagatggagtaatcatcttttcggacatacttaccccactacctgcatttggtgtccaatttgacattgaagatgtaagaggcccagtcattcagtctcccattcgttctgaagagggattgaaatcattgcactctattgacttggagaaactacaatttgtgggagactcacttaggattttgaggaaggaggttggagagcaagctgcaattttgggttttgtcggagctccttggacaattgctacctacatagttgaaggtggtacaactcgtacgtatacgaagattaaggacatgtgccataccgctcctcatgttttgagagctttgttatctcatttatcaaaagcaattgctgagtatattgtgtatcaagtggagtctggagctcattgcatccaaatatttgattcatggggtggacaactcccacctcatatgtgggactgctggtcaaagccttatattgatgagatagttggtataattaaaagaaagtgcccacaaacacctcttgtgctctacattaacggaaatggtgggcttcttgaacggatgaaaacaactggagttgatgtaattggacttgactggacagtggatatggcagatggaaggaggcgactaggaacagatattggtatacaggggaatgtggatcccgctaccttgttttgtcctcttcctgcattgacagatgaaattaaaagggttgtcaagagtgcagggactagtggtcacatcctcaatcttggccacggtgtgctcgtgggtacacctgaagaagccgtagctcacttctttgatgttgctaagagcttcgattttgacaaggttgaggatcatgtatctgaggcagacaaagttgtagcttga

SEQ ID NO: 492 - protein, 420 aa, Solanum tuberosum
MAMVFSPLTSSGCSSYCNLGLSWKSSSLFVELGFLSNGSKGVSAKPAKLNASKVFRACASSSSSDPLLVKAARREQVSRPPAWMMRQAGRYMAVYRKLAEKHPSFRERSETTDLIVEISLQPWEAFHPDGVIIFSDILTPLPAFGVQFDIEDVRGPVIQSPIRSEEGLKSLHSIDLEKLQFVGDSLRILRKEVGEQAAILGFVGAPWTIATYIVEGGTTRTYTKIKDMCHTAPHVLRALLSHLSKAIAEYIVYQVESGAHCIQIFDSWGGQLPPHMWDCWSKPYIDEIVGIIKRKCPQTPLVLYINGNGGLLERMKTTGVDVIGLDWTVDMADGRRRLGTDIGIQGNVDPATLFCPLPALTDEIKRVVKSAGTSGHILNLGHGVLVGTPEEAVAHFFDVAKSFDFDKVEDHVSEADKVVA

SEQ ID NO: 493 - DNA, 531 bp, Triticum aestivum
atgatgcggcaggctgggcggtacatggcgtcgtaccaggcgctgtccaagcgccacccttcgttccgggagcggtcggagaccaccgacctcatcgtcgaaatcacgctacagccgtggcacgccttcgcacccgacggcgtcatcctattctcggacatactcacgcccctgccggccatcggggtgccgttcgatatctcggaatccaaggggccggtgatccagtctcccgtgcggacggaggaacaggtcagggagctcgttcccatagatctcgataagctccagttcgtcggggagtcgctcaagattctgcgcagcgagattgatggaaaagctgctttgctaggattcgtgggggccccatggacaattgcaacttatgttgttgaaggagggatgaccaacacttacacaaatataaatggaaatggaggcttgctcgagcgcatgaaggacatcggagttgatgttattgggcttgactggacagtggatatggcagatggaaggaggcgccgttggtga

SEQ ID NO: 494 - protein, 176 aa, Triticum aestivum
MMRQAGRYMASYQALSKRHPSFRERSETTDLIVEITLQPWHAFAPDGVILFSDILTPLPAIGVPFDISESKGPVIQSPVRTEEQVRELVPIDLDKLQFVGESLKILRSEIDGKAALLGFVGAPWTIATYVVEGGMTNTYTNINGNGGLLERMKDIGVDVIGLDWTVDMADGRRRRW

SEQ ID NO: 495 - DNA, 1212 bp, Thalassiosira pseudonana
atgaaggtcgtccaacatctcctctccatcggcctactatcaacagcggtggccttcacgcccgccaccacctctcgctcgcccaccgccctccattcgtccacagaagcagtcgttgaatccacagccaatggtgtaaacaagggagaccgcgacatcctcgtccgctgtgcctccgggcagcaagttgaacgtacgcccgtctggctcatgcgtcaagctggtcgttacatgtctgcgtttcgtcaatactctgacaaatatccctttcgtgagcgtagtgagactccctcaatggccattgaattgagtttgcaatgtcatcgtgcatacggaatggatgggattatcatgttctctgatatcttgactccgttgcctacgttgggaattgagtttgacgttgtcaaggggcttgggccggtgatttcaacggaggtacgaactgaggcggatgttgccaagttgaaggatgttgagagtgtgaactttgatgagacattgccattcatccgtgagattttgggatcattatccaaggaggcagaggaagcaaatacgtcattgattggatttgttggagctccgtttacgttggctgcttacactattgaggggaaatcctccaagcactgcttatccacaaagaagatgatgatggctgacgaggatggatcttccaaggctgtttcacagttcttggacaaactcgccgtaatgattggaaactatgcatgccatcaaatagaatgcggagctcaggtcattcaggtgtttgaatcatgggcgcaccaattgagccctcgtcagtttgaagcatttgcaaagccagcagcacaaaaggccattcgtatcattaaggagaagtaccccgatgtgcccgtgatttattttgccaatggaggatcgtcgtacttggaacttcagaaggatatgggatgtgatatgattgccgttgactggtctgttgatatgaaagaggctcgtaagatccttggtcctgatattccaatctctggaaacattgatcctaccatcttgtttggcacgaaagaacaaatcgagcaggctgtgagagattgcattgataaggccggaggacctggaaagcatttgttaaacttgggacatggagttatgcagggtactcctgaggaggctgttggatggttggtggatgagtgcaaacgttacaggggacagaatgcgtaa

SEQ ID NO: 496 - protein, 403 aa, Thalassiosira pseudonana
MKVVQHLLSIGLLSTAVAFTPATTSRSPTALHSSTEAVVESTANGVNKGDRDILVRCASGQQVERTPVWLMRQAGRYMSAFRQYSDKYPFRERSETPSMAIELSLQCHRAYGMDGIIMFSDILTPLPTLGIEFDVVKGLGPVISTEVRTEADVAKLKDVESVNFDETLPFIREILGSLSKEAEEANTSLIGFVGAPFTLAAYTIEGKSSKHCLSTKKMMMADEDGSSKAVSQFLDKLAVMIGNYACHQIECGAQVIQVFESWAHQLSPRQFEAFAKPAAQKAIRIIKEKYPDVPVIYFANGGSSYLELQKDMGCDMIAVDWSVDMKEARKILGPDIPISGNIDPTILFGTKEQIEQAVRDCIDKAGGPGKHLLNLGHGVMQGTPEEAVGWLVDECKRYRGQNA

SEQ ID NO: 497 - DNA, 1179 bp, Triphysaria sp.
atggcgtgcatttatagcagctcagtttcatcaatctctacaaaattgaatttcgcgcctctctctaatcataaacccaaattctattgctctatcggaggtgccgttgcggagccaaaagctgtaaatgttaccgagcctctgttacttaacgccgcacggggcaaagaagtagacagacccccggtttggcttatgagacaagcagggaggtacatgaagagttaccaaactctgtgcgaaaaatatccatccttccgtgaaagatcggaaaatgttgatcttgtggtggaaatttcacttcagccgtggaaagtgtttaaacccgatggcgtcatattattctctgatattcttacccctttgtccggtatgaacatacctttcgacattgtcaaaggtaagggtcccataatattcgatccgattcggacaactggcgatgttgaaaaagtgagagaattcactcccgatgagtcggttccgtatgttggtgaagctctaacgatcttgcgcaaagaggtaaacaatgaagcggcagtgctcggttttgttggagctcctttcacgctggcttcttatgttgttgaaggaggttcctcgaaacacttctcgaaaataaaaagactggctttttcggagcccaaggtccttcatgcactacttcaaaaatttgctacctccatggccaaatacattcagtaccaagccgacaaaggggcccaagctgtccagattttcgattcgtgggccactgaactcagcccggtcgatttcgaagagttcagcctcccttacctgaagcaaattgtcgataccataaaacggacccacccgactctcccgctcatactctatgcaagtgggtcaggtggattaatcgagagactaaccttgacgggcgttgatgtggttagcttggattggacggtcgatatggccgaaggtagaaaacggcttggccctaatgtagccattcagggtaatgtggaccccggtgttctttttggttcgaaagagttcattaccgagaggatcaaggataccgttaggaaagctggaaaagggaaacatattttgaatcttggacatgggattgttgtgggtacgcctgaagaaaacgtggctcatttttttgaggttgctaaggggcttaggtattcagattttgatttttaa

SEQ ID NO: 498 - protein, 392 aa, Triphysaria sp.
MACIYSSSVSSISTKLNFAPLSNHKPKFYCSIGGAVAEPKAVNVTEPLLLNAARGKEVDRPPVWLMRQAGRYMKSYQTLCEKYPSFRERSENVDLVVEISLQPWKVFKPDGVILFSDILTPLSGMNIPFDIVKGKGPIIFDPIRTTGDVEKVREFTPDESVPYVGEALTILRKEVNNEAAVLGFVGAPFTLASYVVEGGSSKHFSKIKRLAFSEPKVLHALLQKFATSMAKYIQYQADKGAQAVQIFDSWATELSPVDFEEFSLPYLKQIVDTIKRTHPTLPLILYASGSGGLIERLTLTGVDVVSLDWTVDMAEGRKRLGPNVAIQGNVDPGVLFGSKEFITERIKDTVRKAGKGKHILNLGHGIVVGTPEENVAHFFEVAKGLRYSDFDF

SEQ ID NO: 499 - DNA, 1236 bp, Volvox carteri
atgcaatccagcacaatgcggcaagcggcgagctcccagcgctgcagcggacagccgtttaagccgaaccagactgcaccgcgtgcacggatttgcagcatggcttgtcaggcggctggtgcgcaagatccactgttgctgcgcgttgcaaggggcgaagatgctgagaggacgccggtgtggctgatgcggcaggcgggtcgctacatggctgccttcagggagttttcggacaagtaccccttccggatgcgctccgagacccccgacatcgccatcgagctctccttgcagccgctgcgcgccttccgccccgatggcatcattttcttttcggacatcctcacgccgctgcctggcatgggcattgagtttgacatggttaagggcaagggccccgtcatcgccaacccagttcggtccgcagaacatctgcggcaacttgtgccgctctccgaccccgcctcccggctacccttcatccagaagattctatccaccttgcgacaggaggccgactccgagggggtgacgctgctgggcttcatcggtaccccctggactctggcggcctatgccatggagggcaaggcggacaaggactgcaaggaaaccaaggtgtggaaaataatgttccacaatccagcgttgttgcactcgttcctggacttcctaaccgagcagttgattgtctacgccggctaccagattgagagcggcgcgcaggtgatccagctgtttgacagctgggcgcaccacctgtcgccggcgcagtttgccgagttcagcatgccgtacgcagagcgcatcacgcgcgcgctcaaggccaagtacccgcatgtcccggtgattttccacgccaacggcggcacgggcaagctggagctgatgaaggagacggcggctgatgtggtgggtctggattgggcggtggacatgaaggacgccagggccaccctcggacatggcgtcaaagtgcagggcaatgttgatcccatgtcgctgttcggtccggaagagcacatccgcgtcgaggtggagcgctgcttgagggccgctggaccccgaggacacatcctcaacgtggggcatggtgtcgtacagggcactccggagtcctctgtggcgttgttctgcgagctcgctcgtcagtcggggcaaatacacgccaagaccgccccagctgcaacagctgctactgccagcagcggagtccgggcgccggtgttggcatag

SEQ ID NO: 500 - protein, 411 aa, Volvox carteri
MQSSTMRQAASSQRCSGQPFKPNQTAPRARICSMACQAAGAQDPLLLRVARGEDAERTPVWLMRQAGRYMAAFREFSDKYPFRMRSETPDIAIELSLQPLRAFRPDGIIFFSDILTPLPGMGIEFDMVKGKGPVIANPVRSAEHLRQLVPLSDPASRLPFIQKILSTLRQEADSEGVTLLGFIGTPWTLAAYAMEGKADKDCKETKVWKIMFHNPALLHSFLDFLTEQLIVYAGYQIESGAQVIQLFDSWAHHLSPAQFAEFSMPYAERITRALKAKYPHVPVIFHANGGTGKLELMKETAADVVGLDWAVDMKDARATLGHGVKVQGNVDPMSLFGPEEHIRVEVERCLRAAGPRGHILNVGHGVVQGTPESSVALFCELARQSGQIHAKTAPAATAATASSGVRAPVLA

SEQ ID NO: 501 - DNA, 1173 bp, Volvox carteri
atgcagaccaaggctttcacctcggcgcggccgcagcgtatggctgcgcttaaggcccagcgtgcccccgcggtgactgtgcgtgccgccgctgctccagctgtggcccctgcaccggcctccagctccagtgtcgatgagccactgatgctgcgcgccctgcgcggtgagaaggtggagcggccgccggtgtggatgatgcgccaggccggccgctaccaaaaggtgtaccaggacctctgcaagaagcaccccacgttccgcgagcgctcggagcgcgttgaccttgctgtggagatttctctgcagccctggcacgcgttcaagcccgatggcgtcattctgttctcggacatcctgaccccgctgccgggcatgaacatccccttcgacatggctcccggccccatcattatggaccctattcgcactatggcgcaagtagagaaggtgacgaagctggacgcggacgccgcctgccccttcgtcggcgagtctctgcgccagctgcgctcgtacatcggcaaccaggccactctgctgggcttcgtgggtgcgcccttcaccctggcgacgtacattgtcgagggcggctcgtccaagaactttgcgcacattaagaagatggccttctccactccggaagtgttgcacgcgctgctggacaagctggcggacaatgtggccgactacgtgcgctaccaggccgacgcgggtgctcaggtggtgcagattttcgatagctgggcttcggagttgcagccccaggacttcgacgtgttctccgggccgtacatcaagaaggtgatcgacagcgtccgcaagacacaccccaacctccctatcatcctttacatctcaggctcgggcggtctgcttgagcgcatggctgccgcgcagcccgacatcatctctctggaccagtcggtggacttcacagacggcgtgaagcgatgcggcgccaactttgccttccagggcaacatggaccccggcgtgctgttcggctccaaggacttcatcgagacgcgcgtcatggatacaatcaaggccgcccgatctgctggcgtgcgccacattatgaaccttgggcatggtgtgctgccaggcactccagaggaccacgtgggccacttcttccacgtcgcccggaccgcccacgagcgcatgtaa

SEQ ID NO: 502 - protein, 390 aa, Volvox carteri
MQTKAFTSARPQRMAALKAQRAPAVTVRAAAAPAVAPAPASSSSVDEPLMLRALRGEKVERPPVWMMRQAGRYQKVYQDLCKKHPTFRERSERVDLAVEISLQPWHAFKPDGVILFSDILTPLPGMNIPFDMAPGPIIMDPIRTMAQVEKVTKLDADAACPFVGESLRQLRSYIGNQATLLGFVGAPFTLATYIVEGGSSKNFAHIKKMAFSTPEVLHALLDKLADNVADYVRYQADAGAQVVQIFDSWASELQPQDFDVFSGPYIKKVIDSVRKTHPNLPIILYISGSGGLLERMAAAQPDIISLDQSVDFTDGVKRCGANFAFQGNMDPGVLFGSKDFIETRVMDTIKAARSAGVRHIMNLGHGVLPGTPEDHVGHFFHVARTAHERM

SEQ ID NO: 503 - DNA, 1188 bp, Volvox carteri
atgactggaaaaacgattttgcgttccgatggcatttgccgcagcgccgttcttaggcatcttgcgttcaagcctatcgccgtaggcatgtcgcgagcgacagcggtagttgttaaagcacagccagctgcaggcggcatgcaagatccgctcatggttcgcgctgcgcgtggcgaaaaagttgagcgtgctccctgctggatgatgcggcaagctggccgctatcaaaaatcgtatcgggagctggcgaagaaacatccgtcttttcgtgagcgttctgagacaactgagctgatcgtggagatcagcttacagccctggaattccttcaggccagatggcgtcattttgtttagcgacattcttacacctcttccggggatcggtgtcaactttgacatcgacgataacaaggggccgattattgatacccccatccgtagcctggagcaagtgaagcagctgcacgaaatggatttcggcaaggtggacttcgtgggcagggcattgacccagctccgggcagaggtgaacaaccaagcggcggtgctgggcttcgtgggctccccgtggacgttagccacgtacctgattgagggtggttccacgtcgctatataagaccattaagacgatgtgcttttctgcgccagacgtcctggacgccttgctgaccaagctggcggatgctatggctgcgtacatcaagtaccagatccgtgcgggcgcccagtgcgtgcagatttttgactcgtggggtgggcagctcccaccccgggagtgggagaagtggagcggaccgtatctgaagcgcatcattgcatcggtgaaagctgagtatcccacagtgccgctgacgctctatgcgaacggttcgggcggcctcttggaacgcttggcggcaacgggcgcggacgtggttggcgttgactggacgacggacatgtcggacgcgcggcgtcggatagatagcaatgtatcggtgcagggcaacgtggaccccgctatcctctttgcatcgaaggatgctattgaggatgccgtgcgggattgcctgcgcaaggcggggggcaatcgccacatcctcaacctgggccacggagtcttggtgggcacgcccgaggagggagtcgcgcacatgttcgatctgtcgaaacgcttgacatacgccgacgttgctcagatctga

SEQ ID NO: 504 - protein, 395 aa, Volvox carteri
MTGKTILRSDGICRSAVLRHLAFKPIAVGMSRATAVVVKAQPAAGGMQDPLMVRAARGEKVERAPCWMMRQAGRYQKSYRELAKKHPSFRERSETTELIVEISLQPWNSFRPDGVILFSDILTPLPGIGVNFDIDDNKGPIIDTPIRSLEQVKQLHEMDFGKVDFVGRALTQLRAEVNNQAAVLGFVGSPWTLATYLIEGGSTSLYKTIKTMCFSAPDVLDALLTKLADAMAAYIKYQIRAGAQCVQIFDSWGGQLPPREWEKWSGPYLKRIIASVKAEYPTVPLTLYANGSGGLLERLAATGADVVGVDWTTDMSDARRRIDSNVSVQGNVDPAILFASKDAIEDAVRDCLRKAGGNRHILNLGHGVLVGTPEEGVAHMFDLSKRLTYADVAQI

SEQ ID NO: 505 - DNA, 1206 bp, Vitis vinifera
atgtgttgctgtctcggctggagctcttcctcctccgtacaactagggtttcttcccgccagattttttcgcgtttcttccagaccaaccaaaagatttcatttcaaatgctcttcttcggttcctgattctgatccactcttggttaaggctgcaagaggggaccctgttactcggcctccagcatggatgatgcgccaagccggaaggtacatggctgtttacagaaagcttgcagagaaatacccatccttcagacagaggtcagagacaactgatctcattgtggaaatttctttgcagccttgggaagctttccaccctgatggtgttatcattttctccgacatacttacacctttacctgcatttggtgtcccatttgacatagaggaagtgaggggccctgttattcattctccaattcgctctgaagaaggcttgaaagtattgcatcccatagacttaaagaagcttcattttgtgggagaatcactaagaattttgcggcaggaggtggggggacaagctgctgttctgggttttgtaggagcaccttggacaattgggacatatatagtggaaggcggtacaactcgaacatatacgatcataaaaagcatgtgtcatacagcaccaaatgtattgagggctcttctttctcatttaacacaggcaatatctgaatacattgttttccaagttgaatccggggcccattgtatacaaatatttgattcttggggtggtcaactaccgcctgatatgtgggagtgctggtcaaaaccttatattgaagagatggtgagtgttgtaaggaaaaggtgccctggaactccaattgttctctacattaatggaaatggtggccttcttgagcgaatgaaaggaactggggtcgatgtgattggacttgactggacggtggatatggctgatggaagaaagcgattggggagtggaatcagtatacagggaaatgtggatcctgcttatttattttctcctcttcctgccttgactgatgaaattcaaagggttgtgaggtgtgcaggaccaaggggccacattcttaatttaggtcacggcgttcttgttgggacacctgaagaagctgttgcacatttctttgaagttgcaagaaacttgaaccttagtacactgcttgaagacaatgcagtggaggaacctaaattggctgtttga

SEQ ID NO: 506 - protein, 401 aa, Vitis vinifera
MCCCLGWSSSSSVQLGFLPARFFRVSSRPTKRFHFKCSSSVPDSDPLLVKAARGDPVTRPPAWMMRQAGRYMAVYRKLAEKYPSFRQRSETTDLIVEISLQPWEAFHPDGVIIFSDILTPLPAFGVPFDIEEVRGPVIHSPIRSEEGLKVLHPIDLKKLHFVGESLRILRQEVGGQAAVLGFVGAPWTIGTYIVEGGTTRTYTIIKSMCHTAPNVLRALLSHLTQAISEYIVFQVESGAHCIQIFDSWGGQLPPDMWECWSKPYIEEMVSVVRKRCPGTPIVLYINGNGGLLERMKGTGVDVIGLDWTVDMADGRKRLGSGISIQGNVDPAYLFSPLPALTDEIQRVVRCAGPRGHILNLGHGVLVGTPEEAVAHFFEVARNLNLSTLLEDNAVEEPKLAV

SEQ ID NO: 507 - DNA, 734 bp, Zea mays
agcagatactgagctttattcagtgggagtcatcagtgttataccataagacagtgcagatacatagcaacaccatgaagttggtaatacatgaaagcaagaaaagtaaggaagagtcacctgtttgatatatggttttgaccactgctcccacacatgaggtggaagctgtccaccccatgaatcaaatatctgtatacactgggccctcgagttaacttggtaaatgatatagtcagatatggcttgtgcaaggtgagagagaagacccttcaagacatctggagctgtatggcacatgctctttatatttgtgtacgtgttggtcatccccccttcaacaatgtaagttgcaattgtccatggggcccccacaaatcctagcaaagcagcttttccatcaatctcatttcgcagaatctttagtgactccccgacgaactggagcatatcaaggtcgatggggacgagctccctcacctgctctttggaccgtactggcgattggatcacgggccccttggagtccgagatatcgaacggcaccccgatggccggcaggggcgtgagtatgtccgagaacaggatgacgccgtcgggcgcgaaggcacgccacggctgcagcgtgatctcgacgatgaggtccgtgttctcggagcgctcccggaacgaggggtggcgcttggccagcgcctggtactccgccatgtaccgccctgcctgccgcatcatcc

SEQ ID NO: 508 - protein, 238 aa, Zea mays
MMRQAGRYMAEYQALAKRHPSFRERSENTDLIVEITLQPWRAFAPDGVILFSDILTPLPAIGVPFDISDSKGPVIQSPVRSKEQVRELVPIDLDMLQFVGESLKILRNEIDGKAALLGFVGAPWTIATYIVEGGMTNTYTNIKSMCHTAPDVLKGLLSHLAQAISDYIIYQVNSRAQCIQIFDSWGGQLPPHVWEQWSKPYIKQVTLPYFSCFHVLPTSWCCYVSALSYGITLMTPTE

SEQ ID NO: 509 - DNA, 1203 bp, Zea mays
atgatgctcccgacggccaccgcgacggccgtcttcctcaccgcggcgccttcctctttctccacccgccgtcggcgcagtcgcgccatcttcgcatccctttcgccgtccttctccgcctcggaggagccgctgctggtgcgcgcggcgcggggcgaggacggcctcccacgcccgcccgcgtggatgatgcggcaggcagggcggtacatggcggagtaccaggcgctggccaagcgccacccctcgttccgggagcgctccgagaacacggacctcatcgtcgagatcacgctgcagccgtggcgtgccttcgcgcccgacggcgtcatcctgttctcggacatactcacgcccctgccggccatcggggtgccgttcgatatctcggactccaaggggcccgtgatccaatcgccagtacggtccaaagagcaggtgagggagctcgtccccatcgaccttgatatgctccagttcgtcggggagtcactaaagattctgcgaaatgagattgatggaaaagctgctttgctaggatttgtgggggccccatggacaattgcaacttacattgttgaaggggggatgaccaacacgtacacaaatataaagagcatgtgccatacagctccagatgtcttgaagggtcttctctctcaccttgcacaagccatatctgactatatcatttaccaagttaactcgggggcccagtgtatacagatatttgattcatggggtggacagcttccacctcatgtgtgggagcagtggtcaaaaccatatatcaaacagattgtgagtaggattaagaaagagtgccctcatgtaccccttgtgttgtatataaatggaaatggaggtttacttgagcgcatgaaggacacaagagttgatgttattgggcttgactggacagtggacatggctgatggaaggaagcgccttggtaatggaattagtgtacaagggaatgtggatccagcatttctgttctcaccattaccagtactgactgatgaaattcgtagggttgtgaaagcagctggtacaaaaggtcatatacttaacttgggccacggtgtacttcagaaaacacccgaagaagctgtagcacatttctttgatgtcacaaggagcttgagatatgacacccatttccaaggttctgttgctgaaggattgcagcctgttgcttga

SEQ ID NO: 510 - protein, 400 aa, Zea mays
MMLPTATATAVFLTAAPSSFSTRRRRSRAIFASLSPSFSASEEPLLVRAARGEDGLPRPPAWMMRQAGRYMAEYQALAKRHPSFRERSENTDLIVEITLQPWRAFAPDGVILFSDILTPLPAIGVPFDISDSKGPVIQSPVRSKEQVRELVPIDLDMLQFVGESLKILRNEIDGKAALLGFVGAPWTIATYIVEGGMTNTYTNIKSMCHTAPDVLKGLLSHLAQAISDYIIYQVNSGAQCIQIFDSWGGQLPPHVWEQWSKPYIKQIVSRIKKECPHVPLVLYINGNGGLLERMKDTRVDVIGLDWTVDMADGRKRLGNGISVQGNVDPAFLFSPLPVLTDEIRRVVKAAGTKGHILNLGHGVLQKTPEEAVAHFFDVTRSLRYDTHFQGSVAEGLQPVA

SEQ ID NO: 511 - DNA, 876 bp, Zea mays
atgcccgtcttcctctccgcggcgccccctcctttttccacccgccgtcggcgcagccgccttcctgccatttccgcatccctttcgccgtccccttcctcttcggaggagccgctgctggtgcgcgcggcgcggggcgaggacggcctcccacgcccacccgcgtggatgatgcgacaggcagggcggtacatggcggagtaccaggcgctggccaagcgccacccctcgttccgggagcgctccgagaacacggacctcatcgtcgagatcacgctgcagccgtggcgtgccttcgcgcctgacggcgtcatcctgttctcagacatactcacgcccctaccggccatcggggtaccgttcgatatctcggactccaaggggcccgtgatccaatcgccagtgcggtccgaagggcaggtgagggagctcgtccccatcgaccttgatatgctccagttcgtcggagagtcactaaagattctgcgaaatgagattgatggaaaagctgctttgctaggatttgtgggggccccatggacaattgcaacttacattgttgaaggggggatgaccaacacatacacaaatataaagaacatgtgccatacagctcccgatgtcttgaggtgtcttctatctcatcttgcagaagcgatatctgactatatcatttaccaagttaactccggggcccagtgtatacagatatttgattcatggggtggacaacttccacctcatgtgtgggagcagtggtcaaaaccatatatcaaaaagtggacatggctgatggaaggaagcgccttggtaatggaattagtgtccaagggaatgtggatccagcatttctgttctcaccattaccagtactga

SEQ ID NO: 512 - protein, 291 aa, Zea mays
MPVFLSAAPPPFSTRRRRSRLPAISASLSPSPSSSEEPLLVRAARGEDGLPRPPAWMMRQAGRYMAEYQALAKRHPSFRERSENTDLIVEITLQPWRAFAPDGVILFSDILTPLPAIGVPFDISDSKGPVIQSPVRSEGQVRELVPIDLDMLQFVGESLKILRNEIDGKAALLGFVGAPWTIATYIVEGGMTNTYTNIKNMCHTAPDVLRCLLSHLAEAISDYIIYQVNSGAQCIQIFDSWGGQLPPHVWEQWSKPYIKKWTWLMEGSALVMELVSKGMWIQHFCSHHYQY

SEQ ID NO: 513 - DNA, 1203 bp, Zea mays
atgatgctcccgacggccaccgcgacggccgtcttcctcaccgcggcgccttcctctttctccacccgccgtcggcgcagtcgcgccatcttcgcatccctttcgccgtccttctccgcctcggaggagccgctgctggtgcgcgcggcgcggggcgaggacggcctcccacgcccgcccgcgtggatgatgcggcaggcagggcggtacatggcggagtaccaggcgctggccaagcgccacccctcgttccgggagcgctccgagaacacggacctcatcgtcgagatcacgctgcagccgtggcgtgccttcgcgcccgacggcgtcatcctgttctcggacatactcacgcccctgccggccatcggggtgccgttcgatatctcggactccaaggggcccgtgatccaatcgccagtacggtccaaagagcaggtgagggagctcgtccccatcgaccttgatatgctccagttcgtcggggagtcactaaagattctgcgaaatgagattgatggaaaagctgctttgctaggatttgtgggggccccatggacaattgcaacttacattgttgaaggggggatgaccaacacgtacacaaatataaagagcatgtgccatacagctccagatgtcttgaagggtcttctctctcaccttgcacaagccatatctgactatatcatttaccaagttaactcgagggcccagtgtatacagatatttgattcatggggtggacagcttccacctcatgtgtgggagcagtggtcaaaaccatatatcaaacagattgtgagtaggattaagaaagagtgccctaatgtaccccttgtgttgtatataaatggaaatggaggtttacttgagcgcatgaagaacacaggagttgatgttattgggcttgactggacagtggacatgactgatggaaggaggcgccttggtaatggcattagtgtacaagggaatgtggatccagcatttttgttctcaccattaccagtactgactgatgaaattcatagggttgtgaaagcagctggtccaaaaggtcatatacttaatctgggccatggtgtacttcagaaaacacccgaagaagctgtagcacatttctttgatgtcacaaggcgcttgagatatgacacccttttccaaggttctgttgctgaagaattgcatcacgttgcttga

SEQ ID NO: 514 - protein, 400 aa, Zea mays
MMLPTATATAVFLTAAPSSFSTRRRRSRAIFASLSPSFSASEEPLLVRAARGEDGLPRPPAWMMRQAGRYMAEYQALAKRHPSFRERSENTDLIVEITLQPWRAFAPDGVILFSDILTPLPAIGVPFDISDSKGPVIQSPVRSKEQVRELVPIDLDMLQFVGESLKILRNEIDGKAALLGFVGAPWTIATYIVEGGMTNTYTNIKSMCHTAPDVLKGLLSHLAQAISDYIIYQVNSRAQCIQIFDSWGGQLPPHVWEQWSKPYIKQIVSRIKKECPNVPLVLYINGNGGLLERMKNTGVDVIGLDWTVDMTDGRRRLGNGISVQGNVDPAFLFSPLPVLTDEIHRVVKAAGPKGHILNLGHGVLQKTPEEAVAHFFDVTRRLRYDTLFQGSVAEELHHVA

SEQ ID NO: 515 - protein, 29 aa, artificial sequence
  motif 13
  VARIANT (8)..(8): / replace = "Leu"
  VARIANT (16)..(16): / replace = "Leu"
  VARIANT (17)..(17): / replace = "Pro" / replace = "Ala"
  VARIANT (18)..(18): / replace = "Val" / replace = "Ser"
  VARIANT (19)..(19): / replace = "Phe"
  VARIANT (20)..(20): / replace = "Arg"
  VARIANT (21)..(21): / replace = "Asp"
  VARIANT (23)..(23): / replace = "Cys"
  VARIANT (24)..(24): / replace = "Lys"
  VARIANT (26)..(26): / replace = "His"
  VARIANT (27)..(27): / replace = "Asp"
  VARIANT (28)..(28): / replace = "Phe"
VERPPVWMMRQAGRYMKEYQELREKYPSF

SEQ ID NO: 516 - protein, 29 aa, artificial sequence
  motif 14
  VARIANT (2)..(2): / replace = "Ala"
  VARIANT (5)..(5): / replace = "Ile"
  VARIANT (11)..(11): / replace = "Val"
  VARIANT (12)..(12): / replace = "Ile"
  VARIANT (13)..(13): / replace = "Pro"
  VARIANT (14)..(14): / replace = "Gln"
  VARIANT (15)..(15): / replace = "Gly"
  VARIANT (17)..(17): / replace = "Asn"
  VARIANT (22)..(22): / replace = "Met"
  VARIANT (24)..(24): / replace = "Lys"
  VARIANT (25)..(25): / replace = "Ser"
  VARIANT (29)..(29): / replace = "Ile"
DGVILFSDILTPLPAMGIPFDIVEGKGPV

SEQ ID NO: 517 - protein, 21 aa, artificial sequence
  motif 15
  VARIANT (8)..(8): / replace = "Phe"
  VARIANT (12)..(12): / replace = "Ala" / replace = "Ser"
  VARIANT (14)..(14): / replace = "Ile" / replace = "Met"
  VARIANT (15)..(15): / replace = "Ile"
  VARIANT (19)..(19): / replace = "Gly"
  VARIANT (20)..(20): / replace = "Thr"
LGFVGAPWTLATYVVEGGSSK

SEQ ID NO: 518 - protein, 29 aa, artificial sequence
  motif 16
  VARIANT (4)..(4): / replace = "Lys"
  VARIANT (5)..(5): / replace = "Val"
  VARIANT (7)..(7): / replace = "Gln"
  VARIANT (13)..(13): / replace = "Met"
  VARIANT (23)..(23): / replace = "Ala"
  VARIANT (25)..(25): / replace = "Asn"
  VARIANT (26)..(26): / replace = "Val"
QPWRAFKPDGVILFSDILTPLPGMGIPFD

SEQ ID NO: 519 - protein, 25 aa, artificial sequence
  motif 17
  VARIANT (4)..(4): / replace = "Ala"
  VARIANT (6)..(6): / replace = "Leu"
  VARIANT (15)..(15): / replace = "Ala"
  VARIANT (16)..(16): / replace = "Ser"
  VARIANT (18)..(18): / replace = "Gln"
  VARIANT (21)..(21): / replace = "Ala"
  VARIANT (22)..(22): / replace = "Asp" / replace = "Lys"
  VARIANT (24)..(24): / replace = "His"
RPPVWMMRQAGRYMKVYRDLCEKYP

SEQ ID NO: 520 - protein, 41 aa, artificial sequence
  motif 18
  VARIANT (2)..(2): / replace = "Val"
  VARIANT (6)..(6): / replace = "Ala" / replace = "Val"
  VARIANT (7)..(7): / replace = "Glu"
  VARIANT (12)..(12): / replace = "Ala" / replace = "Cys"
  VARIANT (13)..(13): / replace = "Ile"
  VARIANT (20)..(20): / replace = "Gly"
  VARIANT (21)..(21): / replace = "Thr"
  VARIANT (22)..(22): / replace = "Glu"
  VARIANT (24)..(24): / replace = "Pro"
  VARIANT (26)..(26): / replace = "Val"
  VARIANT (28)..(28): / replace = "Trp" / replace = "Tyr"
  VARIANT (31)..(31): / replace = "Trp"
  VARIANT (32)..(32): / replace = "Ala"
  VARIANT (33)..(33): / replace = "Lys"
  VARIANT (36)..(36): / replace = "Ile" / replace = "Gln"
  VARIANT (37)..(37): / replace = "Gln"
  VARIANT (39)..(39): / replace = "Val"
  VARIANT (40)..(40): / replace = "Ile"
YIRYQIDSGAQVVQIFDSWAGQLSPQDFEEFSLPYLKQIVD

SEQ ID NO: 521 - protein, 50 aa, artificial sequence
  motif 19
  VARIANT (7)..(7): / replace = "Asn" / replace = "Asp"
  VARIANT (11)..(11): / replace = "Gly" / replace = "Thr"
  VARIANT (17)..(17): / replace = "Ala"
  VARIANT (18)..(18): / replace = "Lys"
  VARIANT (21)..(21): / replace = "Ala"
  VARIANT (22)..(22): / replace = "Glu"
  VARIANT (24)..(24): / replace = "Val"
  VARIANT (25)..(25): / replace = "Val"
  VARIANT (26)..(26): / replace = "Phe"
  VARIANT (29)..(29): / replace = "Asn"
  VARIANT (33)..(33): / replace = "Gln"
  VARIANT (48)..(48): / replace = "Glu" / replace = "Asp"
  VARIANT (49)..(49): / replace = "Val
MCHTAPHVLRALLSHLTQAISDYIIYQVESGAHCIQIFDSWGGQLPPHMW

SEQ ID NO: 522 - protein, 50 aa, artificial sequence
  motif 20
  VARIANT (14)..(14): / replace = "Gly"
  VARIANT (17)..(17): / replace = "Ala"
  VARIANT (37)..(37): / replace = "Asn"
  VARIANT (38)..(38): / replace = "Asp"
  VARIANT (40)..(40): / replace = "Gly"
  VARIANT (41)..(41): / replace = "Ile"
  VARIANT (49)..(49): / replace = "Phe"
YINGNGGLLERMKDTGVDVIGLDWTVDMADGRRRLGSGISVQGNVDPAYL

SEQ ID NO: 523 - protein, 29 aa, artificial sequence
  motif 21
  VARIANT (2)..(2): / replace = "Leu"
  VARIANT (16)..(16): / replace = "Val"
  VARIANT (21)..(21): / replace = "Met"
  VARIANT (23)..(23): / replace = "Asn"
  VARIANT (27)..(27): / replace = "Thr"
AVLGFVGAPWTIATYIVEGGTTRTYTNIK

SEQ ID NO: 524 - protein, 50 aa, artificial sequence
  motif 22
  VARIANT (2)..(2): / replace = "Met"
  VARIANT (12)..(12): / replace = "Val"
  VARIANT (15)..(15): / replace = "Ile" / replace = "Thr"
  VARIANT (16)..(16): / replace = "Ile"
  VARIANT (18)..(18): / replace = "Lys"
  VARIANT (19)..(19): / replace = "Arg"
  VARIANT (20)..(20): / replace = "His"
  VARIANT (22)..(22): / replace = "Thr"
  VARIANT (30)..(30): / replace = "Ala"
  VARIANT (33)..(33): / replace = "Ala"
  VARIANT (42)..(42): / replace = "Arg"
  VARIANT (43)..(43): / replace = "Ala"
WLMRQAGRYMKSYQDLCEKYPSFRERSENVDLVVEISLQPWKVFKPDGVI

SEQ ID NO: 525 - protein, 50 aa, artificial sequence
  motif 23
  VARIANT (3)..(3): / replace = "Gln"
  VARIANT (8)..(8): / replace = "Ser"
  VARIANT (12)..(12): / replace = "Val"
  VARIANT (40)..(40): / replace = "Ile"
  VARIANT (41)..(41): / replace = "Ala" / replace = "Glu"
  VARIANT (42)..(42): / replace = "Glu" / replace = "Ser" / replace = "Thr"
  VARIANT (45)..(45): / replace = "Gln"
  VARIANT (49)..(49): / replace = "Asn"
YIRYQADNGAQAVQIFDSWATELSPVDFEEFSLPYLKQIVDAVKKTHPDL

SEQ ID NO: 526 - protein, 50 aa, artificial sequence
  motif 24
  VARIANT (4)..(4): / replace = "Gln"
  VARIANT (7)..(7): / replace = "Ser"
  VARIANT (11)..(11): / replace = "Ala" / replace = "Glu"
  VARIANT (14)..(14): / replace = "Asn" / replace = "Asp"
  VARIANT (16)..(16): / replace = "Lys"
  VARIANT (18)..(18): / replace = "Thr"
  VARIANT (33)..(33): / replace = "Ile"
  VARIANT (41)..(41): / replace = "His"
  VARIANT (42)..(42): / replace = "Tyr"
  VARIANT (43)..(43): / replace = "Ser"
  VARIANT (47)..(47): / replace = "Lys"
  VARIANT (48)..(48): / replace = "Met"
YVGEALTILRKEVGNEAAVLGFVGAPFTLASYVVEGGSSKNFTKIKRLAF

SEQ ID NO: 527 - protein, 50 aa, artificial sequence
  motif 25
  VARIANT (14)..(14): / replace = "Ile"
  VARIANT (20)..(20): / replace = "Glu"
  VARIANT (21)..(21): / replace = "Asn"
  VARIANT (22)..(22): / replace = "His"
  VARIANT (32)..(32): / replace = "Ala"
  VARIANT (35)..(35): / replace = "Ser"
  VARIANT (36)..(36): / replace = "Tyr"
  VARIANT (40)..(40): / replace = "Met"
  VARIANT (43)..(43): / replace = "Phe"
  VARIANT (44)..(44): / replace = "His" / replace = "Lys"
PVWMMRQAGRYMKVYRDLRDKYPSFRERSENPDLAIEISLQPWRAFQPDG

SEQ ID NO: 528 - protein, 50 aa, artificial sequence
  motif 26
  VARIANT (2)..(2): / replace = "Leu"
  VARIANT (3)..(3): / replace = "Ser"
  VARIANT (7)..(7): / replace = "Gln"
  VARIANT (8)..(8): / replace = "Ser"
  VARIANT (13)..(13): / replace = "Ile"
  VARIANT (15)..(15): / replace = "Leu"
  VARIANT (24)..(24): / replace = "Thr"
  VARIANT (29)..(29): / replace = "Glu"
  VARIANT (30)..(30): / replace = "Val" / replace = "Glu"
  VARIANT (33)..(33): / replace = "Ala"
  VARIANT (37)..(37): / replace = "Lys"
  VARIANT (38)..(38): / replace = "Gln"
  VARIANT (41)..(41): / replace = "Asp" / replace = "Asn"
  VARIANT (42)..(42): / replace = "Gln"
  VARIANT (45)..(45): / replace = "Ala"
  VARIANT (46)..(46): / replace = "Lys"
YVRYQIDCGAQVVQMFDSWAGQLSPQDYDTFALPYQQKVVRLVKETHPDT

SEQ ID NO: 529 - protein, 50 aa, artificial sequence
  motif 27
  VARIANT (1)..(1): / replace = "Arg"
  VARIANT (9)..(9): / replace = "Lys"
  VARIANT (10)..(10): / replace = "Ser"
  VARIANT (11)..(11): / replace = "Ala"
  VARIANT (18)..(18): / replace = "Ser"
  VARIANT (26)..(26): / replace = "Val"
  VARIANT (27)..(27): / replace = "Val"
  VARIANT (34)..(34): / replace = "Asp"
  VARIANT (37)..(37): / replace = "Ile"
  VARIANT (47)..(47): / replace = "Ala"
  VARIANT (48)..(48): / replace = "Leu"
TLRQEVGNQATVLGFVGAPWTLAAYAIEGKSSKNYAVIKAMAFSEPEILH

SEQ ID NO: 530 - protein, 50 aa, artificial sequence
  motif 28
  VARIANT (3)..(3): / replace = "His"
  VARIANT (8)..(8): / replace = "Ala"
  VARIANT (8)..(8): / replace = "Asp"
  VARIANT (16)..(16): / replace = "Met"
  VARIANT (18)..(18): / replace = "Cys"
  VARIANT (19)..(19): / replace = "His"
  VARIANT (22)..(22): / replace = "Tyr"
  VARIANT (23)..(23): / replace = "Lys" / replace = "Arg"
  VARIANT (24)..(24): / replace = "Met"
  VARIANT (27)..(27): / replace = "Ile"
  VARIANT (39)..(39): / replace = "Thr"
  VARIANT (40)..(40): / replace = "Met"
  VARIANT (43)..(43): / replace = "Asp"
  VARIANT (46)..(46): / replace = "Ile" / replace = "Met"
FRERSETPEIAIELSLQPWRAFGPDGVIMFSDILTPLPALGIEFDVVKGK

SEQ ID NO: 531 - protein, 50 aa, artificial sequence
  motif 29
  VARIANT (1)..(1): / replace = "Ser"
  VARIANT (5)..(5): / replace = "Ser"
  VARIANT (6)..(6): / replace = "His"
  VARIANT (8)..(8): / replace = "Thr"
  VARIANT (9)..(9): / replace = "Glu"
  VARIANT (10)..(10): / replace = "Met"
  VARIANT (11)..(11): / replace = "Ile"
  VARIANT (12)..(12): / replace = "Ile"
  VARIANT (15)..(15): / replace = "Ala"
  VARIANT (17)..(17): / replace = "Tyr"
  VARIANT (20)..(20): / replace = "Asp"
  VARIANT (26)..(26): / replace = "Ile"
  VARIANT (28)..(28): / replace = "Leu" / replace = "Val"
  VARIANT (30)..(30): / replace = "Glu"
  VARIANT (34)..(34): / replace = "Gly"
  VARIANT (35)..(35): / replace = "Gln"
  VARIANT (39)..(39): / replace = "Ala"
  VARIANT (41)..(41): / replace = "Tyr"
  VARIANT (42)..(42): / replace = "Glu"
  VARIANT (45)..(45): / replace = "Ala"
  VARIANT (46)..(46): / replace = "Lys" / replace = "Leu"
  VARIANT (48)..(48): / replace = "Ala"
  VARIANT (49)..(49): / replace = "Asn"
  VARIANT (50)..(50): / replace = "Gln"
HAFLDKLADALGVYVCHQIESGAQVVQIFDSWAHHLSPQQFLEFSHPYAE

SEQ ID NO: 532 - protein, 29 aa, artificial sequence
  motif 30
  VARIANT (4)..(4): / replace = "Lys"
  VARIANT (5)..(5): / replace = "Val"
  VARIANT (7)..(7): / replace = "Gln"
  VARIANT (13)..(13): / replace = "Met"
  VARIANT (23)..(23): / replace = "Ala"
  VARIANT (25)..(25): / replace = "Asn"
  VARIANT (26)..(26): / replace = "Val"
QPWRAFKPDGVILFSDILTPLPGMGIPFD

SEQ ID NO: 533 - DNA, 2194 bp, Oryza sativa; identical to SEQ ID NO: 289

SEQ ID NO: 534 - DNA, 56 bp, Artificial sequence
  primer: prm12179
ggggacaagtttgtacaaaaaagcaggcttaaacaatgaactctgcttctcttagc

SEQ ID NO: 535 - DNA, 50 bp, Artificial sequence
  primer: prm12180
ggggaccactttgtacaagaaagctgggtgacaccactccttaaactacc

SEQ ID NO: 536 - DNA, 951 bp, Populus trichocarpa
atggctatgcaagcaggagtcagcgtctctaggatcctcatcctcgccggagcaggatataccggtacgattatgctcaaaaacggtaaattatcagaattattgggtgaacttcagtccttgacgaagggtatgggaaaatctggggaacaatctgatggtgattctgactactctgatgccattgcccaacaggtacgtcggttagcaatggaagttcgacaactggcctctgcacggcaaataacagttctcaatgggaattctggccaaatgggtaacctcactggtcttatagctccagctgccaccttgggggcattgggttatggttacatgtggtggaagggtctaaaattctcagattttatgtacgtaacaaagcgtagtatggcaagtgctgtttcaaacttgacaaaacatttggagcaagtatctgaggctctgtctactgccaagacgcatttgacacagagaatacaacttttggatgataaaatggagagtcaaaaggagatctcaaaggcaattcaaaatgacgtcaatgctgcctctgaaaatcttacacaaattggttctgagttatggcagttgcagtgtttagtatctggtttggatggaaagataggttcattggaggagaaacaggatattgcaaatatgggtgtgatgtacctgtgcaactttgttggtggcaaaaaagcaaaaatgcctaaagctctagaggatcagttcaaaccttcaggaagaactcgtgcttcactcatgtactctgaagtcccaagtttgacgggtctaaaggagcttgcagacgatttatctcaaaccttcggtgagccagccactgatgctattctgcaagatggaactgataatctggaagaccagccaagaatcccacgtattgatcaaccgagagctctgctcaggtttaattctgccaggtgttga

SEQ ID NO: 537 - protein, 316 aa, Populus trichocarpa
MAMQAGVSVSRILILAGAGYTGTIMLKNGKLSELLGELQSLTKGMGKSGEQSDGDSDYSDAIAQQVRRLAMEVRQLASARQITVLNGNSGQMGNLTGLIAPAATLGALGYGYMWWKGLKFSDFMYVTKRSMASAVSNLTKHLEQVSEALSTAKTHLTQRIQLLDDKMESQKEISKAIQNDVNAASENLTQIGSELWQLQCLVSGLDGKIGSLEEKQDIANMGVMYLCNFVGGKKAKMPKALEDQFKPSGRTRASLMYSEVPSLTGLKELADDLSQTFGEPATDAILQDGTDNLEDQPRIPRIDQPRALLRFNSARC

SEQ ID NO: 538 - DNA, 951 bp, Populus trichocarpa
atggctatgcaagcaggagtcagcgtctctaggatcctcatcctcgccggagcaggatataccggtacgattatgctcaaaaacggtaaattatcagaattattgggtgaacttcagtccttgacgaagggtatgggaaaatctggggaacaatctgatggtgattctgactactctgatgccattgcccaacaggtacgtcggttagcaatggaagttcgacaactggcctctgcacggcaaataacagttctcaatgggaattctggccaaatgggtaacctcactggtcttatagctccagctgccaccttgggggcattgggttatggttacatgtggtggaagggtctaaaattctcagattttatgtacgtaacaaagcgtagtatggcaagtgctgtttcaaacttggcaaaacatttggagcaagtatctgaggctctgtctactgccaagacgcatttaacacagagaatacaacttttggatgataaaatggagagtcaaaaggagatctcaaaggcaattcaaaatgacgtcaatgctgcctctgaaaatcttacacaaattggttctgagttatggcagttgcagtgtttagtatctggtttggatggaaagataggttcattggaggagaaacaggatattgcaaatatgggtgtgatgtacctgtgcaactttgttggtggcaaaaaagcaaaaatgcctaaagctctagaggatcagttcaaaccttcaggaagaactcgtgcttcactcatgtactctgaagtcccaagtttgacgggtctaaaggagcttgcagacgatttatctcaaacattcggtgagccagccactgatgctattctgcaagatggaactgataatctggaagaccagccaagaatcccacgtattgatcaaccgagagctctgctcaggtttaattctgccaggtgttga

SEQ ID NO: 539 - protein, 316 aa, Populus trichocarpa
MAMQAGVSVSRILILAGAGYTGTIMLKNGKLSELLGELQSLTKGMGKSGEQSDGDSDYSDAIAQQVRRLAMEVRQLASARQITVLNGNSGQMGNLTGLIAPAATLGALGYGYMWWKGLKFSDFMYVTKRSMASAVSNLAKHLEQVSEALSTAKTHLTQRIQLLDDKMESQKEISKAIQNDVNAASENLTQIGSELWQLQCLVSGLDGKIGSLEEKQDIANMGVMYLCNFVGGKKAKMPKALEDQFKPSGRTRASLMYSEVPSLTGLKELADDLSQTFGEPATDAILQDGTDNLEDQPRIPRIDQPRALLRFNSARC

SEQ ID NO: 540 - DNA, 564 bp, Prunus persica
atggctatgcaaagcggaatagggttttccaagatcctgatcttagctggagcagggtatactagcaccatcctgcttaagaatggtaaattatctgacttgatcggtgaacttcagtctttgttgaatggaaccggagaacaatcagaaggtgactttgatgcgatcgcatcacaggtgcgccgactggcagctgaggtccggcaacttggctcgtcacgacagataaccgtcctgaatgggaatggcagccaaattggtttgacatcactaataatgccagcagctaccttgggggcattgggttatggttacatgtggtggaagggtctaaaattctcagatcttatgtatgtgacgaagcgtagtatgactgctgctgtttcaaacttgcataaacatctggagagcgtgacagaggctattgctaacacaaagaagcacctgacacagagagtccagaatttggacgataaattgctggagcagaaagagatctcaaagtcgattctggagaatgtggtgatacgaaaggaagtattgaggaactttacgttaccgtga

SEQ ID NO: 541 - protein, 187 aa, Prunus persica
MAMQSGIGFSKILILAGAGYTSTILLKNGKLSDLIGELQSLLNGTGEQSEGDFDAIASQVRRLAAEVRQLGSSRQITVLNGNGSQIGLTSLIMPAATLGALGYGYMWWKGLKFSDLMYVTKRSMTAAVSNLHKHLESVTEAIANTKKHLTQRVQNLDDKLLEQKEISKSILENVVIRKEVLRNFTLP

SEQ ID NO: 542 - DNA, 696 bp, Citrus sinensis
atggctatgcaagcaggaatgagcttccaaaagatactgatgttagctggtttagggtacactggtacgatcttgataaaggatggtaaattaccagaattattacgggagctccagtcattggtagagcgattgtcaaaatctggagagcaagataattttactgatgctattaaagatcagttgaaccggttgaaatttgagtgtcagcgggcatcatctggacagatatttgtgcgtaatgagaattctggtggcaatgcaacttctctcatgattccagctgctactttgggggcattaggttatggttacatgtggtggaagggtctttcatttgctgatctcatgtatgttaccagaaaaagtatggctactgctgtgtcaaacttgaataaacatctggagagcgtaacagaagcccttacagtggcaaagaagcatttgacgcagcgtattcagaaccttaatgataaagtggaaaagcagaatgagatctcaaaggatattagaaaaaatgttgaggaggcttgtgatgacctttttaaagttgaacataacttgaaggacttgcagagcatgatttattgtttggatgggaagattgattcattggcagataagcaggatataacaaatattggcatgtacctcctctgtaactttgttgatggggaaaaaagggaaaccaactga

SEQ ID NO: 543 - protein, 231 aa, Citrus sinensis
MAMQAGMSFQKILMLAGLGYTGTILIKDGKLPELLRELQSLVERLSKSGEQDNFTDAIKDQLNRLKFECQRASSGQIFVRNENSGGNATSLMIPAATLGALGYGYMWWKGLSFADLMYVTRKSMATAVSNLNKHLESVTEALTVAKKHLTQRIQNLNDKVEKQNEISKDIRKNVEEACDDLFKVEHNLKDLQSMIYCLDGKIDSLADKQDITNIGMYLLCNFVDGEKRETN

SEQ ID NO: 544 - DNA, 696 bp, Malus domestica
atggctatgcagagcggaataggggtttccaagatcctgatcttagctggggcagggtatactggcaccatccttcttaagaacggtaaattatccgagctgctcggtgaacttcagtcattgttgaatggatccggggaacacgcagacggtgactatgactccctcacagcacagattagccgaatgacagctgagatcaggcaaattggctcgtcgcgtggcgggggaacggtttttgtgaatgggaacggtagccaaattggtaatatgacatcactaataatgccagcagctaccttgggagcagtgggttatggatacatgtggtggaagggtctaaaattctcagatatgatgtatgtgacaaagcgtggtatggctactgctgttgagaacttgactaaaaatctggataacgtgaaggaggctgttgctaaagcaaagaagcacctgacgcaaaggattcaccatgtggatgacaaaatggcggagcaaaatgagctctcaaggtcaattaacgaagatgttgctggagtgcaacattctcttactgatattgactatgacttgagtagattgcagagcatggtttctggtttggatcataagatgggttctcttgaacaaaagcaggatcttgcaaatcttggtgttatcttacctggccaattttgtccatggaaaaaaagttga

SEQ ID NO: 545 - protein, 231 aa, Malus domestica
MAMQSGIGVSKILILAGAGYTGTILLKNGKLSELLGELQSLLNGSGEHADGDYDSLTAQISRMTAEIRQIGSSRGGGTVFVNGNGSQIGNMTSLIMPAATLGAVGYGYMWWKGLKFSDMMYVTKRGMATAVENLTKNLDNVKEAVAKAKKHLTQRIHHVDDKMAEQNELSRSINEDVAGVQHSLTDIDYDLSRLQSMVSGLDHKMGSLEQKQDLANLGVILPGQFCPWKKS

SEQ ID NO: 546 - DNA, 831 bp, Arabidopsis thaliana
atggctatgcaatctggtattgggttatcgaagattttgattctagctggagcaggttatactagtacgattctggttaagaatgggaagatggcagatattttgggtgagcttcaggctttggttaagcgatttgagaaatctggagatcatgtagatgatgattctgatgccatgactactcagatgcaacgattagcaatggaggttcggcaattggcttcgtcgcggcagataactgttatgaatggagctcagggagctgattttacaccgtttattgtcccggcagcgacattgggagcattaggctatggctatatgtggttcaagggaatttcattctctgatatcatgtgtgtaacgaagcggaacatggaaaatgcagtgtcgaacttgaccaagcatttggataccgtttcagaagctattttgaatgctaagaagcacctgagccagcggcttcagaaggtggacgataagctagacttgcagaaagatctcttaaagggagtccaggataatgtgggtttggctcttgaggatcttgctaacattggagatgattttgacgcaatgcatagcatctttggtggtatgggtgggaaattagatagcattgagtacaagcagaatattgcgaacatgggtttgatatatctgtgcgactctttgggtggagaaaatcacaagatgccggatatattgatgcaggagaagcttcggctttcagggaagtcaaacacatgtatagtacttacaaccgaagaaacttcaagctcagagggtttaaaagaaagcgataagatacagctactagatgactgctaa

SEQ ID NO: 547 - protein, 276 aa, Arabidopsis thaliana
MAMQSGIGLSKILILAGAGYTSTILVKNGKMADILGELQALVKRFEKSGDHVDDDSDAMTTQMQRLAMEVRQLASSRQITVMNGAQGADFTPFIVPAATLGALGYGYMWFKGISFSDIMCVTKRNMENAVSNLTKHLDTVSEAILNAKKHLSQRLQKVDDKLDLQKDLLKGVQDNVGLALEDLANIGDDFDAMHSIFGGMGGKLDSIEYKQNIANMGLIYLCDSLGGENHKMPDILMQEKLRLSGKSNTCIVLTTEETSSSEGLKESDKIQLLDDC

SEQ ID NO: 548 - DNA, 852 bp, Gossypium hirsutum
atggctatgcaaaccggagtaggtttgtcgaagatcttgatcttagccggcgccggttatacgggtactgtcctcctgaaaaacggtaaattatcggacatattaggcgaattgcagtcgctggtgaagggactcgaaaaatcgggggagcaagctgatgattcagatgcacttctagctcaggtgcgtcgtttgtcaacggagatcaggcaactggcatcagcacggcagataactgttctgaatggggattctggcggtaagttaacctctcttgtagtgccagccgcaacattgggggcattgggttatggttacatgtggtggaagggtatttcattctctgatcttttctgggtcaccaaacgcaatatggcgatggctgtggagaacttaacaaaacatctggattctgtctcagatgctctctctgctgcgaagaagcatttgactcaacgcattcagaacctggatgataaaatggaaacacagaaggaaatctcgaagagcattcaaacaagtgtagaagaggctcatatgaatctgtctaatattgaatatgatttggatgcactgcagagaatgatctctggtttggatggcaaaattggttcattggaatataagcaggatcttgctaatgctggtgtgtggtacctttgtaatatggttggtggaaagaaagcaaacatgcctgaagctctgcaggagcaacttaaactttctgggaaatctcgtgctttacttgcatcaggaactccagctctgaagggtctgaaagatgttgcagatatttcatctggaaatatgaatgattcaggaagagatggttttgtgaaagatggcttttga

SEQ ID NO: 549 - protein, 283 aa, Gossypium hirsutum
MAMQTGVGLSKILILAGAGYTGTVLLKNGKLSDILGELQSLVKGLEKSGEQADDSDALLAQVRRLSTEIRQLASARQITVLNGDSGGKLTSLVVPAATLGALGYGYMWWKGISFSDLFWVTKRNMAMAVENLTKHLDSVSDALSAAKKHLTQRIQNLDDKMETQKEISKSIQTSVEEAHMNLSNIEYDLDALQRMISGLDGKIGSLEYKQDLANAGVWYLCNMVGGKKANMPEALQEQLKLSGKSRALLASGTPALKGLKDVADISSGNMNDSGRDGFVKDGF

SEQ ID NO: 550 - DNA, 912 bp, Brassica napus
atggcgatgcaaaccggaatcggcttatcaaggatctttctcttagccggagcaggttgtaccggtacgatcatgatgaagaacggtaaattatctgatatattgggtgaattgcagtctctggtgaagggtatggagagatctggagaggaaggagactctgatgtctccgatgctatagctgcacaggttcgtcgtttggctatggaggttcgtcagctagcttcggctcggcagataacggttatgaatggagtttctggtgcgaacttgcaagcacttgctgttcctgctgcggcgttgggagctttaggatatggttatatgtggtggaagggactctcgttcactgaccttatgtatgtgacgaaagccaacatggctactgccgtggctaacttgactaagaatctggagcaagtttctgcgacccttgcggctgcaaaaaggcatttaacgcagaagattcagaatatggatgataaggtagagaagcagattgatctctccaaggaaatcaagaaccaggtcaccttggctcgtggagatatcaacttgcttgagaatgagttgcagtctttgaatgatttgattagtggtctggatgggaagttggacacgctggaatacaagcaggatgtcacaaatgtttgcatgctacacttgtataactattttggaggcaagagcaccaaactgcctgacatggagcagcttcaactgcctgtaaaccagaaagctcgtaatttgcttggagatgttggaactaaggggctgaaaaactttgcggaacaactgcttataagcaatgacacagagggaggagcaaccacggtgagaagaattggtataaccagggccaatgacaagtcggggccgctgttatcaagggttgcttcagctgggtgttga

SEQ ID NO: 551 - protein, 303 aa, Brassica napus
MAMQTGIGLSRIFLLAGAGCTGTIMMKNGKLSDILGELQSLVKGMERSGEEGDSDVSDAIAAQVRRLAMEVRQLASARQITVMNGVSGANLQALAVPAAALGALGYGYMWWKGLSFTDLMYVTKANMATAVANLTKNLEQVSATLAAAKRHLTQKIQNMDDKVEKQIDLSKEIKNQVTLARGDINLLENELQSLNDLISGLDGKLDTLEYKQDVTNVCMLHLYNYFGGKSTKLPDMEQLQLPVNQKARNLLGDVGTKGLKNFAEQLLISNDTEGGATTVRRIGITRANDKSGPLLSRVASAGC

SEQ ID NO: 552 - DNA, 915 bp, Arabidopsis thaliana
atggcgatgcaggccggagttggcttatccaggatctttctcttagccggagcaggttacactggtacgatcatgatgaagaatggaaaattgtcggatttgttgggtgaattgcagagtttggtgaagggaatggagaaatctggagaagggtctgagggagattctgatgtttctgatgctatagctgcacaggttcgccggttggctatggagattcgacagctagcttcgcagcaacacataacggtcatgaatggagtttctggtgcaaacctacaagcccttgctgttcctgctgcggcattgggagctctcggatatggttatatgtggtggaagggactctcattcactgaccttatgtatgtgacaaaagccaacatggctgctgcagtggctaacttgacaaagaatctggagcaagtttctgagactcttgcggctgcgaaaaggcatttaacacaaaggattcagaatctggatgataaggtagaaaagcagatcgatctctcgaaggaaatcaatagccaggttatttctgctcgtgagaatatcagctcacttgagatggatttggaatcattgcataatttgattactggactggatgggaagttggacacgctggaatacaagcaggatgtcacaaatgttttcatgctaaacttgtataactattttggaggcaagagcacaaagctgcctgaaatggaacagcttcagcttcctgtaaaccagagggctcgtaatttgcttgcagatgttgaaactaagggtctgaaaaacttggctgaagagctgtttaaaagcaatggcacacaggtgacaaccacagtgaaacaaatcagtttgagtaaagtgaatgtgaagtcgaggccattgttatcaagggctgcttcagctaagtgttga

SEQ ID NO: 553 - protein, 304 aa, Arabidopsis thaliana
MAMQAGVGLSRIFLLAGAGYTGTIMMKNGKLSDLLGELQSLVKGMEKSGEGSEGDSDVSDAIAAQVRRLAMEIRQLASQQHITVMNGVSGANLQALAVPAAALGALGYGYMWWKGLSFTDLMYVTKANMAAAVANLTKNLEQVSETLAAAKRHLTQRIQNLDDKVEKQIDLSKEINSQVISARENISSLEMDLESLHNLITGLDGKLDTLEYKQDVTNVFMLNLYNYFGGKSTKLPEMEQLQLPVNQRARNLLADVETKGLKNLAEELFKSNGTQVTTTVKQISLSKVNVKSRPLLSRAASAKC

SEQ ID NO: 554 - DNA, 918 bp, Malus domestica
atggctatgcagagcggaatagggttttccaagatcctgatcttagcaggggcagggtatacaagcaccatcctgcttaagaacggtaaattatccgacttgctcggtgaacttcagtctttgttgaatggatccggggaacacacagaaggtgactatgattccttgacagcacagattagccgactaacagctgagatcaggcaaattggctcgtcgcggggcggcagcacggttttcgtgaatgggaacggtagccaaattggtaatatgacatctctaataatgccagcagctaccttgggagcagtgggttatggttacatgtggtggaagggtctaaaactctcagatattatgtacgtgacaaaacgtggcatggctaccgctgttgagaacttgactaaaaatctggataatgtgaaagaggccgttgctaaagcaaagaagcacctgacgcagagaatccagcatgttgatgacaaaatggtggagcaaaatgagctctcaaggtcaattaaggaagatgttgctggagtgcaacattctctcactgatattgactatgacttgagtagattgcagatcatggtttctggtttggatcataagattggttctcttgaacacaagcaggatctcgcaaaccttggtgttatctacctggtcaattttgtggatgggaaaaaagttgaaatgcctaaaactctgcagaagcaacttgaaaaccctgggaagtcacgtggtcgtttactctcatattcagatacttcaggcttgatgggtctcaaagaaattgcggactctctgtctgaaacattaaatccatcaactgatgctattgtgaaagatgatattgaaatgacgggggagtatcggaagaacaacctgataaggtcggtgtcgaccagatgttga

SEQ ID NO: 555 - protein, 305 aa, Malus domestica
MAMQSGIGFSKILILAGAGYTSTILLKNGKLSDLLGELQSLLNGSGEHTEGDYDSLTAQISRLTAEIRQIGSSRGGSTVFVNGNGSQIGNMTSLIMPAATLGAVGYGYMWWKGLKLSDIMYVTKRGMATAVENLTKNLDNVKEAVAKAKKHLTQRIQHVDDKMVEQNELSRSIKEDVAGVQHSLTDIDYDLSRLQIMVSGLDHKIGSLEHKQDLANLGVIYLVNFVDGKKVEMPKTLQKQLENPGKSRGRLLSYSDTSGLMGLKEIADSLSETLNPSTDAIVKDDIEMTGEYRKNNLIRSVSTRC

SEQ ID NO: 556 - DNA, 939 bp, Medicago truncatula
atggctatggcttatcatagtggaatcgggatctccaaggtcctattcatcgccgtaactggttacaccggcaccgtcctcctcaaaaacggcaaattatccgatttgatcggtgatctccaggcactggtgaaaggattggaaaagtccggggatcaggctgaaggtgaaggagaacatgcatcggatgctattgctgctcagattcggcgtttggctaatgaagtgaagcatttatcatcaaacagacaaaccatagtaatgaatggaggctcaggacaaagtagtaatttgtcatctcttgtggttccagcagccaccttgggtgctgtgggttatggttacatgtggttgaagggcgtttcattctcagatcttatgtacgtgactaaacgcaacatggaaaatgctgttgcagatttgacaaaaaagctgcagcatgcctcggatgtcattgctgatgctaagaagcacttgacccagagaattcaaattttggatgacaaaatgcgcaaacaatataagatggcacagtcaattaaggatgatgttaataaagttcaagatactgttactactatacatgatgacttgagcgtcgtgcaacacacagtgaaaatgttggatggaaggttgaattcagtacttgagaatcaggaatttgcaaatatgggattggactatattattggctttataacggcaaatgcccggagagtgccggactctttacagggaactattccaaaggaacaaccaaaacttccagggaggtctactagtatgctcacatatccaggatttcagggtcttaaagacattgcagagtcattgtctagtttagacaggtcagcttcagatactattgtgccgggtggtttggataatctggagaagcagcgaaggccgttgttgagggctacttcgaccaagtgttga

SEQ ID NO: 557 - protein, 312 aa, Medicago truncatula
MAMAYHSGIGISKVLFIAVTGYTGTVLLKNGKLSDLIGDLQALVKGLEKSGDQAEGEGEHASDAIAAQIRRLANEVKHLSSNRQTIVMNGGSGQSSNLSSLVVPAATLGAVGYGYMWLKGVSFSDLMYVTKRNMENAVADLTKKLQHASDVIADAKKHLTQRIQILDDKMRKQYKMAQSIKDDVNKVQDTVTTIHDDLSVVQHTVKMLDGRLNSVLENQEFANMGLDYIIGFITANARRVPDSLQGTIPKEQPKLPGRSTSMLTYPGFQGLKDIAESLSSLDRSASDTIVPGGLDNLEKQRRPLLRATSTKC

SEQ ID NO: 558 - DNA, 951 bp, Populus trichocarpa
atggctatgcaagctggaatcggcgtctctaggatcctcatcctcgccggagcaggatacaccggtacgatcatgctcaaaaacggtaaattatccgaattaatcgctgaacttcagagcttggtgaaggggatggaaaaatccggggaaaaatctgatggtgattctgactactctgatgccattgcccaacaggtgcgtaggttggcaatggaagttcggcaactggcctctgcacggcaaataacagttctcagtgggaatcctggccaaatgggtaacctcacaggtcttataattccagctgccaccctgggggcattgggttacggttacatgtggtggaagggtctaaaattctcagatcttatgtatgtaacaaagcgcagtatggcaagtgctgtttcaaacttgacaaaacatttggagcaagtatccgaggctctgtctactgccaagacacatttaacacaaagaatacaacatttggatgataaaatggagagtcaaaaggagatctcaaaggcaattcaaaatgatgtcaatgctgcctctgaaaatctaacactaattggttctgagctgtggcagttgcagtgtttggtatctggtctggatgggaagataggttcattggaggagaaacaggatattgcaaatatgggtgtgatgtacttgtgcaactttgttggtggcaaaaaagcaaaaatgcctaaagctctggaggatcagcttaaaccttcagggagaactcgtgcctcactcgcatacgctgaagtcccaagtttgacgggtctaaaggagcttgcagacgatttatctcaaactttcagcaagccagcaactgatgctactttgcaagatggaactgataatctggaagaccagctaagaaccccacgtaatgatcaaccaagagctcttctcaggtttaattctgccaggtgttga

SEQ ID NO: 559 - protein, 316 aa, Populus trichocarpa
MAMQAGIGVSRILILAGAGYTGTIMLKNGKLSELIAELQSLVKGMEKSGEKSDGDSDYSDAIAQQVRRLAMEVRQLASARQITVLSGNPGQMGNLTGLIIPAATLGALGYGYMWWKGLKFSDLMYVTKRSMASAVSNLTKHLEQVSEALSTAKTHLTQRIQHLDDKMESQKEISKAIQNDVNAASENLTLIGSELWQLQCLVSGLDGKIGSLEEKQDIANMGVMYLCNFVGGKKAKMPKALEDQLKPSGRTRASLAYAEVPSLTGLKELADDLSQTFSKPATDATLQDGTDNLEDQLRTPRNDQPRALLRFNSARC

SEQ ID NO: 560 - DNA, 552 bp, Saccharum officinarum
atggcgctggtgcaggcgggcatgggcctcactcgggtcgtggtcctcgtcggcgccggcgtcgccggctccgtcgtcctccgcaacggccgcctcgccgagatcctcggcgagctccaggagatactagacaaggggaacaaggggaaggacggaggagggggagacggggaagccgatctcaacgaggcgcttacctcgcaggtgcgtcgcctaaccatggaggtcaggcaacttgcttcttcacgtccaataactgttctcaatggaggttctggacaatcaggagtatcaggcctgatagtacctgcagcgactgtaggagcactgggttatggttatatgtggtggaaagcccaggggatctcgtttgccgacctaatgtatgtcaccaagcgcaacatggcaaatgctgtttcaagcatgactaaacatttggagcaagtccaaagttctcttgctgctgctaaaaggcatttgacacagcgcattgaaaagttggatgataaaattggatcagcaaaaggctctatctggacaaataagagatga

SEQ ID NO: 561 - protein, 183 aa, Saccharum officinarum
MALVQAGMGLTRVVVLVGAGVAGSVVLRNGRLAEILGELQEILDKGNKGKDGGGGDGEADLNEALTSQVRRLTMEVRQLASSRPITVLNGGSGQSGVSGLIVPAATVGALGYGYMWWKAQGISFADLMYVTKRNMANAVSSMTKHLEQVQSSLAAAKRHLTQRIEKLDDKIGSAKGSIWTNKR

SEQ ID NO: 562 - DNA, 717 bp, Persea americana
atggcaatgcaaagcggagtagggctttccaagatcttgatcattgcgggagcaggttatactggcgcgatcgtgctgaaagagcgtcacttagcggatatattacgggatcttctggagattttgtcgaagagcaaaccgaaatcggaagacggaaacgcccacttctcggacgacaaggatgtcttagatcaggtgcgccggttggcaatggaagtccgacaactagccacagcacggccgataacagtgttcaatggagaatcaagccaattgggaagcatagcgtctcttgcaatgccagctgcagccttgggcgcattgggctatggttacatgtggtggaaagggctgtcctttacagatctgatgtatgtaacgaagcgcaacatgacaaatgctgtatcaagcttaacaaaaaacttggagcaagtttctgctgcccttgctgctacaaagaggcatttgacacagcgaattgagaatttggatgggaagttagatgagcagaaggagatgtcaaaattaattaagaacgaggttactgagggtcgtgctgatatttctcaaattggttatgacttagaaacactgcagaaattggtcaatgggttggacggaaagataggtaccttggaagacaaacaggattttgcaaattctggtgtgtggtacctttggtcaatatgctggagtaaaagatccgaaaatggctga

SEQ ID NO: 563 - protein, 238 aa, Persea americana
MAMQSGVGLSKILIIAGAGYTGAIVLKERHLADILRDLLEILSKSKPKSEDGNAHFSDDKDVLDQVRRLAMEVRQLATARPITVFNGESSQLGSIASLAMPAAALGALGYGYMWWKGLSFTDLMYVTKRNMTNAVSSLTKNLEQVSAALAATKRHLTQRIENLDGKLDEQKEMSKLIKNEVTEGRADISQIGYDLETLQKLVNGLDGKIGTLEDKQDFANSGVWYLWSICWSKRSENG

SEQ ID NO: 564 - DNA, 855 bp, Centaurea maculosa
atggcgatgcaagctggaatggggttttctaagatcatcatcttagttggagcagggtacactggtaccttgatgatgaaaaacggtaaactttctgatgttttgggcgaacttcaggctttggtgaaaggatatgaagaaaagcaggggggtggagctgaaactgatcattccgatgcaattgcggcccaggttcgtcgattagcaatggaagttcggcagatggcttcgtcaaggcagatcactgttctgaatggtggttctagtggtactgcatcatctttagtggtaccggttgctaccttgggagctgtgggttatggatacatgtggtggaagggttattcgttctcggatctcatgtatgtgacaaagcaaaatatggcaactgctgtcacaaacttgacaaagcatctggaacaagtgtcagatgcccttgctgcagccaagaagcacttgacacagaggattgagaacttagatggaaaacttgatcagcaagtggaaatatcaaagttgattaaaagtgaggtgactgatgttcgtgatgatctttcccaaataggctacgacttggattcactaaatagaatggtttctggtctgaatggcaagataatgacattggaagaaaagcaggatctaaccaaccttggagtgtggtacctctgcaacaaagctgatggaaacaagatctctggcaaggcacaggaacaattccgacttgctggcaaatcctttgctggttatctcacatccaggggaacactaaatctcgagggcgtgaaggaaatggccgatactttagactcagatgatgcttctttggggtcggacaaacacttagagggctga

SEQ ID NO: 565 - protein, 284 aa, Centaurea maculosa
MAMQAGMGFSKIIILVGAGYTGTLMMKNGKLSDVLGELQALVKGYEEKQGGGAETDHSDAIAAQVRRLAMEVRQMASSRQITVLNGGSSGTASSLVVPVATLGAVGYGYMWWKGYSFSDLMYVTKQNMATAVTNLTKHLEQVSDALAAAKKHLTQRIENLDGKLDQQVEISKLIKSEVTDVRDDLSQIGYDLDSLNRMVSGLNGKIMTLEEKQDLTNLGVWYLCNKADGNKISGKAQEQFRLAGKSFAGYLTSRGTLNLEGVKEMADTLDSDDASLGSDKHLEG

SEQ ID NO: 566 - DNA, 861 bp, Oryza sativa
atggcgctagtgcaggtgggtatggggttgggccgcgtcgtcctcctcgtcggcgccggcatggccggctcggtcgtcatccgcgacggccgcttcgccgacttcgtcgcggggctccaggaggctctgcgcgacaacgacggcggcggaagcggcagcggcggcggcgtcatcgatcaaatcgaagaagccgtcaagaaggcgactatggaggttaatcagatgataagtcaaccagttactgtcattactgtagatcctgcagttgtgacaacgttgatagcacctgctgcagctgctggggcgttgacctatggttacatgcgctggaaaggcatatctattgctagtctgatgtatgtcaccaagcaaaatatggctaatgctgttgcaagcatgaccaagcatttggaacaagtgcagagctctcttgcagctgctaaaaggcacttaacccagcgcattcaacatttggatgataagttggatcagcagaaacagatttccgggcaaataaaagaggaggttactggtgcacgattgaaactccaggatattggttccgaaatgcaaaagatcaaacaagtggctcatggcctgggtggaaagttggattcaattgaagcaaaacagaactattcattggccggtgtgatgtacctcgtcgaattcatagagcaaaacggtgggaggttgcctcgtagcgtggaacacttgcaacgaactgccaggctctctggaattactggagaccaaaagcagctgcaggggctcggtcagttgctggcgatcgagtcggcgactcctgtaggaagtggacttcactgtacctcggcacggttattcaaggcagtggcatga

SEQ ID NO: 567 - protein, 286 aa, Oryza sativa
MALVQVGMGLGRVVLLVGAGMAGSVVIRDGRFADFVAGLQEALRDNDGGGSGSGGGVIDQIEEAVKKATMEVNQMISQPVTVITVDPAVVTTLIAPAAAAGALTYGYMRWKGISIASLMYVTKQNMANAVASMTKHLEQVQSSLAAAKRHLTQRIQHLDDKLDQQKQISGQIKEEVTGARLKLQDIGSEMQKIKQVAHGLGGKLDSIEAKQNYSLAGVMYLVEFIEQNGGRLPRSVEHLQRTARLSGITGDQKQLQGLGQLLAIESATPVGSGLHCTSARLFKAVA

SEQ ID NO: 568 - DNA, 861 bp, Oryza sativa
atggcgatggtgcaggccggcatgggcctcacccgcgtcgttgtcctcatcggcgccgggatggccggctccgtcgtcctccgcaacggccgcctctccgagatcctcggcgagctccaggagatactggacaagggggagaaggggaaagacggagaagggggcgggggcgccgacatgacggacgcgctcactagacaggtgcgcaacttggctatggaggttaaacaacttgcttcttcccgtggatctataactgttcttaatggaggttctggtcaaacaggggtgtcaggtttgatagtacctgcagcaactgttggagcactcggttatggttacatgtggtggaagggcatctcctttgcggacctaatgtatgtgactaagcgtaacatggcaaatgctgtttccagtatgactaagcatctggagcaagtgcaaacctctcttgctgctgctaaaaggcatttgactcagcgtattgaaaggttggatgataaattggatcagcaaaaggcgctttctggacaaataagagatgatgttactgatgcacgactgaagcttgagaatattggttcagaaattaagaacatcaaacaattggtttggggtctggatgaaaaaatggattcgatggaagccaaacagaacttttcatgtgctggtgtgatgtacctctgccaatttattgagcaaaatggtggaaagctgccagaacgcctggaaggctcaaaaatggctgggaagcgttttggaagccaaaatctcatacaggggttgcaactggccatagaaacagggaattttgacaaggaaacgttcaatgcacttaagaacaactctgattcaagataa

SEQ ID NO: 569 - protein, 286 aa, Oryza sativa
MAMVQAGMGLTRVVVLIGAGMAGSVVLRNGRLSEILGELQEILDKGEKGKDGEGGGGADMTDALTRQVRNLAMEVKQLASSRGSITVLNGGSGQTGVSGLIVPAATVGALGYGYMWWKGISFADLMYVTKRNMANAVSSMTKHLEQVQTSLAAAKRHLTQRIERLDDKLDQQKALSGQIRDDVTDARLKLENIGSEIKNIKQLVWGLDEKMDSMEAKQNFSCAGVMYLCQFIEQNGGKLPERLEGSKMAGKRFGSQNLIQGLQLAIETGNFDKETFNALKNNSDSR

SEQ ID NO: 570 - DNA, 861 bp, Taraxacum officinale
atggcgatgcaagctggcatggggttttctaggatcgttatcctagtcggagcaggttacaccggtacattgctgataaaaaacgggaagctttctgatgtattgggcgaacttcagggtttagtgaagggctatgagggaaaggaaggatatggagctgaaggtgattactcagacgccattgctagccaggttcgtagattagctatggaagttagacagctggcttcttcccgccaaatcactgttcttaatggcggttctgctggtaatatgacatctctggtggtacctgctgctgcattaggagcagttggctacggatacatgtggtggaagggaatttcattttcagacctcatgtatgttacaaagagtaacatggcaaatgcggtttcaaatttgacaaaaaatcttggacaagttacagatgctatagctgcagcaaagaggcatttaacccaaaggattgaaaacttggatgggaaactggatgatcaagttgaaatatcaaaactaattaaaaacgaggtgactaatgttcgtggtgatgtttcacaaatagggtatgacttggattcactaaataaaatgatatccggtttgaatggaaagataatgacattggaagaaaaacaagatatgactaatcttggagtgtggtacctctgcaatatggctgatggaaacaaattatccgggacagcaaaggaacaatttaaacttgctggcaagtcttttggtggtcattctggtggatttctgtccattgatggtgtgaaggagattgctgaaactttagatccagaaaaagaatccagaatgttgaccaggagacattcggtcaagttggtggtatag

SEQ ID NO: 571 - protein, 286 aa, Taraxacum officinale
MAMQAGMGFSRIVILVGAGYTGTLLIKNGKLSDVLGELQGLVKGYEGKEGYGAEGDYSDAIASQVRRLAMEVRQLASSRQITVLNGGSAGNMTSLVVPAAALGAVGYGYMWWKGISFSDLMYVTKSNMANAVSNLTKNLGQVTDAIAAAKRHLTQRIENLDGKLDDQVEISKLIKNEVTNVRGDVSQIGYDLDSLNKMISGLNGKIMTLEEKQDMTNLGVWYLCNMADGNKLSGTAKEQFKLAGKSFGGHSGGFLSIDGVKEIAETLDPEKESRMLTRRHSVKLVV

SEQ ID NO: 572 - DNA, 876 bp, Festuca arundinacea
atggcgatggcgcaggcgggcttcggcgtcacccgcgtcgtgatgctcatcggcgccggcatggccgggtccgtcgtcctccgcaacggccgcctctccgagatcctcaccgagatgcaggagtttctggagaaggcggacaaggggaaggaaggtggtggtggtggtgcggaccacggcatcagtgacgcgctcaacgaggtgcgcctcctagccatgcaggtacggcagctcggttctccacgctccataactgttctcaacggaggttctggacaatcaggactatcgggactaatagtacctgcagcaactgttggggcactcggttatggttatatgtggtggaaaggaatctcttttgcggacttgatgtatgtcaccaagcaaaacatggcaaacgttgtttcaagtatgactaaacatctggagcaagtccagacctctcttgctgctgctaaaaagcatttgacacaacgtattgagaagttggatgacaaattggatcagcaaaaggcgctttctgggcaaataaaagatgatgttactggcgcacgattaaagcttgagactattggttcagagattaagaacatcaaggatttggtctggggtctggatgagaagatggattcaatggaagctaaacagaatttttcatgcgccggtgtgatgtacctctgccaattcatagaacaaaatggcgggaagctcccagaacgcctggaaggcattaagccatctgcgaagcgtttttcgtcaattggcatacagggtttgcaactagccatagaaacaggagatttcagtgaattcagcaatgctgattccactgacaagataagcaggtccaactcgttgaagtctgtcagctga

SEQ ID NO: 573 - protein, 291 aa, Festuca arundinacea
MAMAQAGFGVTRVVMLIGAGMAGSVVLRNGRLSEILTEMQEFLEKADKGKEGGGGGADHGISDALNEVRLLAMQVRQLGSPRSITVLNGGSGQSGLSGLIVPAATVGALGYGYMWWKGISFADLMYVTKQNMANVVSSMTKHLEQVQTSLAAAKKHLTQRIEKLDDKLDQQKALSGQIKDDVTGARLKLETIGSEIKNIKDLVWGLDEKMDSMEAKQNFSCAGVMYLCQFIEQNGGKLPERLEGIKPSAKRFSSIGIQGLQLAIETGDFSEFSNADSTDKISRSNSLKSVS

SEQ ID NO: 574 - DNA, 882 bp, Sorghum bicolor
atggctgtggtacaagccggcatgggcctcacccgcttcgtcctcctcgtcggcatcggtgctgtcggcggtcccatcgccgcccgcaacggcaaactcggcgagctcctccgcgatcttcagaagtctcttacagagaagggggcaggagtggaatcgcccgccatcaacgacgacactaacaacatagtggctaaagcacttgctctattggaaaaggagattcatcacattgggacaagacctattattcaggtggatacaggaaacggagctggatcagctttgatagtacctgctgctgctgtaggaacagtcggctactgttacatgtggtggaaaggaatctccttttctagcttgatgtatgtcactaaacgcaatatggctaatgctgttgcaagcatgactaagcatctgcaacaagtgcagagctctcttgccgctgctaaaaagcaattatcacagcgcattcagcgcgtggatgataaattggaacagcagaaggagatttcggtgcaaataaaagatcaggttactggtgcaaagttgaaaatcaagaacattggatcagacatgaataaaataaaaaatatggttacgggcctgaatgagaagatagattcaattgaagcaaaacagaattattcacgtgtggccgtggattatctctgccaattcatagaaaaaagggttgacaagctgccggaacagctggaaggattgcaacaaacagtaaagcgtataggatacaagaactcagagttgccaccggggctgggggggttcgggcaactgctgtccaccgaatcagcaaacccttgcagtagaagaatgcttcgatcagcaggcctgaactctgcacgtctgattctgccttga

SEQ ID NO: 575 - protein, 293 aa, Sorghum bicolor
MAVVQAGMGLTRFVLLVGIGAVGGPIAARNGKLGELLRDLQKSLTEKGAGVESPAINDDTNNIVAKALALLEKEIHHIGTRPIIQVDTGNGAGSALIVPAAAVGTVGYCYMWWKGISFSSLMYVTKRNMANAVASMTKHLQQVQSSLAAAKKQLSQRIQRVDDKLEQQKEISVQIKDQVTGAKLKIKNIGSDMNKIKNMVTGLNEKIDSIEAKQNYSRVAVDYLCQFIEKRVDKLPEQLEGLQQTVKRIGYKNSELPPGLGGFGQLLSTESANPCSRRMLRSAGLNSARLILP

SEQ ID NO: 576 - DNA, 888 bp, Ipomoea nil
atggcgatgcaagctgggatgggcttatctaagatagtcttcttactgggagcagggtacactactaccgtgcttctgaataacggtaaattgtcgaatgtgctgggagaacttcagaatttggtgaaaaattatgaaaaatctgtggaagatggtggagaaactgatgcggtacttgctgcgcaggttcgacggttagctatggaggttcgatcactggcctccgcacgctcaatcactgttctcaatgggggttctaatggtaacataacaaatctggtggttcctgctgctgctgtaggggccttgggctatggatacatgtggtggaagggtatctcattctctgaccttatgtatgtaacaaagcgtagtatggcaactgctgttgaaaacttaacaaagcatctggagcatgtttctgatgccttagctgcaacaaagaggcatttgacgcagagaattgagaatgtagacgggaaactggatgaccaaattgagatatcaaaacaaattcggactgaggttaatgatgttcgtggtgatctttctcaaattggttttgatttggattcactacacaggatggtgactggcctggatggcaagcttctttctttggaagaaaagcaggagcttgcaaatgctggtgtcatgtatctctgtggtattgtcaatggtcaaagtgtaaaaatgcctgaaaaagtccaggaacagctccgtattggtggtaactcagtgggttccctcatgggtctcaaagacatcctggacgtctatgggcaaggagatgaggttaggctcataacagatggcagtgcactggatattgccgacaagtctattgttccaccaaaaagcatgatgaggacggcatcagcaaagtag

SEQ ID NO: 577 - protein, 295 aa, Ipomoea nil
MAMQAGMGLSKIVFLLGAGYTTTVLLNNGKLSNVLGELQNLVKNYEKSVEDGGETDAVLAAQVRRLAMEVRSLASARSITVLNGGSNGNITNLVVPAAAVGALGYGYMWWKGISFSDLMYVTKRSMATAVENLTKHLEHVSDALAATKRHLTQRIENVDGKLDDQIEISKQIRTEVNDVRGDLSQIGFDLDSLHRMVTGLDGKLLSLEEKQELANAGVMYLCGIVNGQSVKMPEKVQEQLRIGGNSVGSLMGLKDILDVYGQGDEVRLITDGSALDIADKSIVPPKSMMRTASAK

SEQ ID NO: 578 - DNA, 888 bp, Solanum tuberosum
atggctatgcacgctggagtaggcttaacaaagatcgtcttcatcgtcggagcagggtatactggtactttgttgtttaaaaacggaaaattatcggatgtgataggcgagcttcagaatttggtcaaaagttatgaaaagacaggggaatcagatggtggagaatcggatgtcattgctgcacaggttcgtagattggcaatggaggttcgacaattggcttccgcacgatcaattactgttcttaatggaagttctagtggtaactggacatctctggtaatgcctgccgctgtagcaggtgccttaggttatggatacatgtggtggaagggtttgtcattctctgaccttatgtatgtaacaaaaaagaatatggcaactgctgtttcaaatctgacaaaacatctcgataatgtctcagaggcccttgctgctacaaagaggcacttaacacagcgaattgagaatgtggatggaaaattggatgagcaaatggagatgtcaaaactaattaggagtgaggttaatgacgtgcatggtgatctgtcccagattggttttgatctggatcaactaaataggatggtttctggtctggatggcaagttactttctttggaaggcaagcaggtccttgcaaatgctggtgttatgtacctgtgtaattttgtcaatggagaaagggtgaagattcctgagacactgcaggaacaacttacaattgtgggcaactctacacctactctgatgggccttaaagaacttgcggactccttaccggaagtaaacagcaacagatttattacagatggcattactcaagatggtattgataaattgaagccgcctagacccctgttgaggactgcctctaccaagtgctga

SEQ ID NO: 579 - protein, 295 aa, Solanum tuberosum
MAMHAGVGLTKIVFIVGAGYTGTLLFKNGKLSDVIGELQNLVKSYEKTGESDGGESDVIAAQVRRLAMEVRQLASARSITVLNGSSSGNWTSLVMPAAVAGALGYGYMWWKGLSFSDLMYVTKKNMATAVSNLTKHLDNVSEALAATKRHLTQRIENVDGKLDEQMEMSKLIRSEVNDVHGDLSQIGFDLDQLNRMVSGLDGKLLSLEGKQVLANAGVMYLCNFVNGERVKIPETLQEQLTIVGNSTPTLMGLKELADSLPEVNSNRFITDGITQDGIDKLKPPRPLLRTASTKC

SEQ ID NO: 580 - DNA, 891 bp, Aquilegia sp.
atggctttgcaaactggaatcgggctttctagactcgttttcatagttggagctggttatactggtacgattgtgttgaagaacggtaaagtatctgatttattagctgaacttcagaaggtgatacagggatgggagaaaggtgattcaaacaataatggttctgatgctttatatgatcaagtgcgtcagttacaaatggcgatacaaaatatggggtcacgccaaattaccgttctgaattctgattctagccagatggggatatcatctttggtactgccagctgcaaccttgggattagtgggatatggatacatgtggttgaagggtttatccttctcagatcttatgtatgtaaccaagcataacatggcaaatgctgttgcaaacatgacaaagcatctggaccaagtgtctgttgcccttgctaaagtaaaaacgcatttaactcagcgacttgagaacttggatggaaaacttgatgagcagaaggagatgtcaaagttaatcaagaacgaggttacagatgtccgtgctgatctttctcaaattggcagtgacatggatgaactgcatagaatggttgctggtctggatgggaagataatgtccttggaagacaagcaggatattgcaaatgctggagtgtattacttggtcaattttgttgcttcaaaggacgccaagatgtctgaattacttaaggaattgcctaaacctgtcaagcctcgccttggattttccgagactccaagtttgaagggtcttaagcaaattgcggacaccatatcgtctggaaatcttgagaaatctgttgtgcaaaatgatcttgataagatcgacattgtcccaagaagtttgactagggttcaatccataaagtgttga

SEQ ID NO: 581 - protein, 296 aa, Aquilegia sp.
MALQTGIGLSRLVFIVGAGYTGTIVLKNGKVSDLLAELQKVIQGWEKGDSNNNGSDALYDQVRQLQMAIQNMGSRQITVLNSDSSQMGISSLVLPAATLGLVGYGYMWLKGLSFSDLMYVTKHNMANAVANMTKHLDQVSVALAKVKTHLTQRLENLDGKLDEQKEMSKLIKNEVTDVRADLSQIGSDMDELHRMVAGLDGKIMSLEDKQDIANAGVYYLVNFVASKDAKMSELLKELPKPVKPRLGFSETPSLKGLKQIADTISSGNLEKSVVQNDLDKIDIVPRSLTRVQSIKC

SEQ ID NO: 582 - DNA, 912 bp, Vitis vinifera
atggcgatgcaaactggtgtaggggtttcaaagatcctgatcctggttggagcaggatacaccagtacgatcttgctcaagaatggcaaattgtcggatatattgggtgaacttcagtcattggtgaaaggattggagaaaaaaggggattcatcaaatggtgaagctgactattctgatgctattgctgcccaggtccgtcggttagcaatggaggtcaaacaacttgcctcagctcgacagataactgttctaaatgggaattctggccaaattggcaacataacatcacttgcaatcccagctgccaccttgggggcattgggatatggttacatgtggtggaagggtctttcaatatcagatcttatgtatgtaacgaagaagaatatggaaactgcggttacaaacttgaaaaagcatctggagcatgtctcagacgctctttctgcaacaaaaaggcatttgacacagcgaattgagaatttggatggaaaactggatgagcagaaggagatctcgaagttaattaagaatgaggttactgaagctcgtggtgatatttctcaaattggctttgacttggattcactacaaaggatggtctctggattggatgggaagataggttcattggaatataagcagaattttgcagttgagggtgtggtgtacctgtgcaacgctgttaatggaagaagtgtaccaatgtctgaaactatgctgaaacagcttaaactacctggcaagtcccacggtttactcacatctacagaagctccaagtttccagggtcttaaggagattgcaggcagtataatatctgaaaattccagatcttcaaatggtatcgtgcaagatggtgttgataaattggatgatcagccaaggagcctgacaaggtttgaatga

SEQ ID NO: 583 - protein, 303 aa, Vitis vinifera
MAMQTGVGVSKILILVGAGYTSTILLKNGKLSDILGELQSLVKGLEKKGDSSNGEADYSDAIAAQVRRLAMEVKQLASARQITVLNGNSGQIGNITSLAIPAATLGALGYGYMWWKGLSISDLMYVTKKNMETAVTNLKKHLEHVSDALSATKRHLTQRIENLDGKLDEQKEISKLIKNEVTEARGDISQIGFDLDSLQRMVSGLDGKIGSLEYKQNFAVEGVVYLCNAVNGRSVPMSETMLKQLKLPGKSHGLLTSTEAPSFQGLKEIAGSIISENSRSSNGIVQDGVDKLDDQPRSLTRFE

SEQ ID NO: 584 - DNA, 924 bp, Helianthus annuus
atggcgatgcaagcaggcatgggattctctaagatcattatcctagtcggagcagggtatactggtacgttgatgctgaataacggtaaattatctgatgtgttgggcgaacttcagaaattggtgaaaggatatgaacaaggacagggggatggaggtgatgctgatcatgctgatgcaattgctgcacaggttagaagattagcgatggaggttcggcagctggcttcttcgaggcagatcactgttctgaatggtggtgctggtggtggtgcaacgtctttagtggtaccagctgctgctgtgggtgctgcgggttatggatacatgtggtggaagggttattcattctcagacctcatgtatgtgacaaagaaaagcatgtcaactgctgtttcaaacttgacaaagcatctggaacaagtgtcagacgcccttgctgctgccaagaaacatttgacacagaggattgagaagttggatggaaaaatggaccagcaagtggaaatatccaagttgattagaagtgaggtgggtgatgtccgtgatgatctttcccaaatcggctatgacttggactcgctaaatcaaatggtttccggtttgaatggcaagataatgacattggaagaaaaacaggatctaactaaccttggagtgtggtacctctgcaacaaggctgaaggaactaagatgtctggcaaggcacaagaacaactcaaacttgccggcaaatcctttgccggttatctcacatcaggggggatgctaaatatcgagggcatgaaggaaatagcagacaatttagattcaagtgacgttaataagtcgccaacaactggcatatcagaagatatttccttcgggtctgacagtcaaccgagaagattgaccaggagaaatactgtcaagttcagctcttga

SEQ ID NO: 585 - protein, 307 aa, Helianthus annuus
MAMQAGMGFSKIIILVGAGYTGTLMLNNGKLSDVLGELQKLVKGYEQGQGDGGDADHADAIAAQVRRLAMEVRQLASSRQITVLNGGAGGGATSLVVPAAAVGAAGYGYMWWKGYSFSDLMYVTKKSMSTAVSNLTKHLEQVSDALAAAKKHLTQRIEKLDGKMDQQVEISKLIRSEVGDVRDDLSQIGYDLDSLNQMVSGLNGKIMTLEEKQDLTNLGVWYLCNKAEGTKMSGKAQEQLKLAGKSFAGYLTSGGMLNIEGMKEIADNLDSSDVNKSPTTGISEDISFGSDSQPRRLTRRNTVKFSS

SEQ ID NO: 586 - DNA, 633 bp, Ananas comosus
atggcgatgcaaagcggaatcgccacctccaaggtcctcatcctcgtcggagcaggattgaccggttcgattatactgaagaatgggagattatcggatgtattagcagagcttcaggaattagtaaaaggtgtaaatgaaggggaagcatcttcaggccactatgacacggctcttcttgcggctcagattcgacatttggctcaagaggttagggatttggcactgtctagacccgtgactgtgttgactggggattcaaattcaagggggaatttggcatcttacatagttccagctgctacagttggagcaatgggttattgctacatgtggtggaaggggtggtctttctctgatgtcatgtttgttacaaaacgcaacatggctaatgctgttgctaatgtatcaaaacaactggagcaagtatcggcagccctagccgcaacaaaaagacatctgactcaacgacttgaaaacgtggatgggaaacttgatgaacagagggagatttctaaaggcattatgaatgaggtcaatgaagttaggactgacctttcccaaatcggatttgatattgagtcgatccaaaaaaatggttgctggactggaaggaaagatcggattgcttga

SEQ ID NO: 587 - protein, 210 aa, Ananas comosus
MAMQSGIATSKVLILVGAGLTGSIILKNGRLSDVLAELQELVKGVNEGEASSGHYDTALLAAQIRHLAQEVRDLALSRPVTVLTGDSNSRGNLASYIVPAATVGAMGYCYMWWKGWSFSDVMFVTKRNMANAVANVSKQLEQVSAALAATKRHLTQRLENVDGKLDEQREISKGIMNEVNEVRTDLSQIGFDIESIQKNGCWTGRKDRIA

SEQ ID NO: 588 - DNA, 714 bp, Triphysaria sp.
atggcgctgcaaactggcgtcgccgcctctaagatccttatcctcgtcggcgcaggtgtaactggatcagttgtcttgaggagcggacacttatctgaattgatttctaaccttcaagtgttgataaaaagagtcgatgaagctgagacatcacctgggaattatgatgccgctattctagtagctcaggttcggcagttggctaaagagatcaaggagttaagtttatccaatcctgtcaccatatttaatgggaattcatcctccagcggaagctatgcttcatatatattgcctacagcagctcttggtgcaatgggatactgttacatgcggtggaagggattttcgttctctgatattatgtatgtcaccaagaataacatggcaaatgctgtagaaaccgtctcgaagcagttagataatgtttctgaagcattggcattgactaagaggcatttgacaaaaaggttggaaaacctggactggaaaatggacgagcagagggaaatatccaaacttgtggccaatgacgtcactgaagtgagatctaatcttaaccaaataggacttgacattggtttgatcaatgagatcgtatctggcttggaaggaaaactcgagcttcttgaaagtaagcaggatatgaccaattcgggtttgtggtatctatgcaatgcggctggaaatattaaagatgatcagaatttctaa

SEQ ID NO: 589 - protein, 237 aa, Triphysaria sp.
MALQTGVAASKILILVGAGVTGSVVLRSGHLSELISNLQVLIKRVDEAETSPGNYDAAILVAQVRQLAKEIKELSLSNPVTIFNGNSSSSGSYASYILPTAALGAMGYCYMRWKGFSFSDIMYVTKNNMANAVETVSKQLDNVSEALALTKRHLTKRLENLDWKMDEQREISKLVANDVTEVRSNLNQIGLDIGLINEIVSGLEGKLELLESKQDMTNSGLWYLCNAAGNIKDDQNF

SEQ ID NO: 590 - DNA, 807 bp, Medicago truncatula
atggccttacagatggcacctgcctcctccaaggttctcatcctcgttggagccggtttggctagttctgttgtcatgaatggtggccaattgtccgatgttattgacaagcttaaggatgtgcttaagttagttgatgatcaggttaagatttcaacctccggatatgacaccgccgttattgctgctcaggttcggcaactagcacaagaaatcgcggagttgtccttatctaggtctaagaccatctataatgacaattcatctagagggggtcttgctccttacatattacctactgctgcaataggagctgtgggatattgttacatgcggtggaggaattggtcattttctgatgtaatgtttgcgacaaagaagaatatgactaatgctgttgcaactgtgtcaaagcaactagagaatgtacatgaaacattagcatcaacgaaaaggcatataataaagaggttggatggtcttggcttggaggtggaaaagcaaaatgagataagcaaacaaattgcagaagatgtgaaggaattgaaggcatttctttctcagattgggtgtgatgttgaacttataaatcaaatgatgtctgagctggaagataagctcaagcttgttgaaggcaatcaggacattacaaattcaggtatatggtatctatgcaaatttattgaagacataaacaatgggccaaatggtggagtttacaagggacttgcagaacttacaaaggcacttgaggagaaagccccccaaatgattatggagaagatatatgagaaagttgagctttag

SEQ ID NO: 591 - protein, 268 aa, Medicago truncatula
MALQMAPASSKVLILVGAGLASSVVMNGGQLSDVIDKLKDVLKLVDDQVKISTSGYDTAVIAAQVRQLAQEIAELSLSRSKTIYNDNSSRGGLAPYILPTAAIGAVGYCYMRWRNWSFSDVMFATKKNMTNAVATVSKQLENVHETLASTKRHIIKRLDGLGLEVEKQNEISKQIAEDVKELKAFLSQIGCDVELINQMMSELEDKLKLVEGNQDITNSGIWYLCKFIEDINNGPNGGVYKGLAELTKALEEKAPQMIMEKIYEKVEL

SEQ ID NO: 592 - DNA, 813 bp, Lactuca sativa
atggcaatgcaaaccggagttagcacctccaaagttctgatcctcgtcggagcaggtctgactagttctgttatcttgagaagtggaaagctttctgatgtaatatcagagcttcaggagttgatgaaaggtgttaatgaagttgaaatcacacctggaaagtatgatagtgcagctcttgcagctcagattcgacaattggcacaagagattcgcgagttgtccctctcacgtcctgttacaatctttaatggaaattctacttctagtgggggttactcatcttatttgatgccagctgcagcccttggagcaatggggtattgttatatgtggtggaaaggtttgtctttgtctgatgttatgtttgtaaccaagaacaatatggcaaatgctgtgtccacagtttcaaaacagttagagaatgtatctgatgcattagcttctacaaagagacatttatcaaagagacttgaaaacttggactggaaattagatgaacagaaggaaataagtacacttatttcaaatgatgtaaatgatgtaaggtcgaatcttaatcaaataggttatgacattgatatgatccatcaaatggtggctggacttgaaggaaaaatagaccttattgaaggaaagcaggatgtgacaaattcagggttatactatttatgtcaagtggctggaggaatcaaagatgggataaatgctaagctttttcaggatattgaagctaagcttggagaaacatcaaaaatcacatttgaggacacttcttttaaagggacttcagtttcttacagaatcaaatga

SEQ ID NO: 593 - protein, 270 aa, Lactuca sativa
MAMQTGVSTSKVLILVGAGLTSSVILRSGKLSDVISELQELMKGVNEVEITPGKYDSAALAAQIRQLAQEIRELSLSRPVTIFNGNSTSSGGYSSYLMPAAALGAMGYCYMWWKGLSLSDVMFVTKNNMANAVSTVSKQLENVSDALASTKRHLSKRLENLDWKLDEQKEISTLISNDVNDVRSNLNQIGYDIDMIHQMVAGLEGKIDLIEGKQDVTNSGLYYLCQVAGGIKDGINAKLFQDIEAKLGETSKITFEDTSFKGTSVSYRIK

SEQ ID NO: 594 - DNA, 900 bp, Pinus taeda
atggctaccaggctattgatccttgtgggcgcaggtctgaccggatctattgttttaaaggatagccgcttatctgatatcctttcagatctccagggactactggtaaagcaagcaggtgcaggggaatcatccaataatggttcagataactctgctgctgttgcttctcaggtgcgtcgtctggcacaggaagtaagagagctggctcaatcgagatcaataacagttcttaatgggaactctggtcaaagtggtaacctgtcaagtctagtagtgccagttgctgcagtgggggccatgggctactgctatatgtggtggaaaggatggtcattctcagattggatgtatgtaaccaagcgtaacatcgcaaatgttactgcaagctttaacaaacagttggatcaagtttcttcagctcttgccgcggtaaaaaagcacttgacccagaggcttgaaaatgtggatggaaagctagatgagcaaaaggaaatatcaaaattaatcaagaatgaggtatttgaagtgcgtggagaccttacacagattggttttgacatagatgcaattcaaaaaatggtttctggcctggaagggaagattgttacattagaagataaacaggattttgcaaatgctggtgtatggtatctttgccaatttgtgggaggagtgaaagatgcatccatgccacaatttatacaggacttcccagcaagagctcgaatagaacgtccagcccctcagttcactgatggtaacagtttgaagggcctccagtacatcgcagacacaattcagtcagggactgttgaccaaacaaatgtaaatgcaattttacagaatgacattactatctctgccaacaaaacgattcgaaaggagccgtcaaattag

SEQ ID NO: 595 - protein, 299 aa, Pinus taeda
MATRLLILVGAGLTGSIVLKDSRLSDILSDLQGLLVKQAGAGESSNNGSDNSAAVASQVRRLAQEVRELAQSRSITVLNGNSGQSGNLSSLVVPVAAVGAMGYCYMWWKGWSFSDWMYVTKRNIANVTASFNKQLDQVSSALAAVKKHLTQRLENVDGKLDEQKEISKLIKNEVFEVRGDLTQIGFDIDAIQKMVSGLEGKIVTLEDKQDFANAGVWYLCQFVGGVKDASMPQFIQDFPARARIERPAPQFTDGNSLKGLQYIADTIQSGTVDQTNVNAILQNDITISANKTIRKEPSN

SEQ ID NO: 596 - DNA, 939 bp, Helianthus paradoxus
atggcgatgcaaactggagttagcacctccaaagttctgatcctcgtcggagcaggtctgactagttctgttatattaaggagtggaaaactctcagatatattatcagagctccaggagttaatgacgggcgttaacgaagttgaaatccaacctggaaagtacgatagtgccgctcttgcagcacagattcgacaattggcacaagaaattcgggagttgtctctctctcgacctgttactattttcaatggagattctagttctagtggaggctactcatcctacttgatgccagctgcagcactaggagcaatgggatattgctatatgtggtggaagggtttatctctttctgatgttatgttcgtaactaagagcaatatggcaaatgctgtatcgacggtttcaaaacaattagagaatgtttcagatgcgttagtttctacaaagagacatctatcaaaaagacttgaaaacttggactggaagttagatgagcagaaggaaataagtaaactgatcgcagatgatgtaaacgatgtgaagtccaatcttaatcagataggttacgacatcgatatgatccatcaaatgatggccggattggaaggaaagcttgatcttatcgaaggaaaacaggatatgaccaattcaggtctatactacttaatgcaagtagctggtgggattaaagatggaataaacgctaagctctttaaggatattgaagctaagataggagaacaatcaaaaattacatttgaggaaacttcgttaaagggccttcagtttcttacggatgctaatgattcggccgcaaaagagaatcctgtgctgactaaaatgagcactaaggtaaacaaagatcaagataacactaaatcaagatttcgtaggccttacccggtgggtttgtcatttgctaaagatatatga

SEQ ID NO: 597 - protein, 312 aa, Helianthus paradoxus
MAMQTGVSTSKVLILVGAGLTSSVILRSGKLSDILSELQELMTGVNEVEIQPGKYDSAALAAQIRQLAQEIRELSLSRPVTIFNGDSSSSGGYSSYLMPAAALGAMGYCYMWWKGLSLSDVMFVTKSNMANAVSTVSKQLENVSDALVSTKRHLSKRLENLDWKLDEQKEISKLIADDVNDVKSNLNQIGYDIDMIHQMMAGLEGKLDLIEGKQDMTNSGLYYLMQVAGGIKDGINAKLFKDIEAKIGEQSKITFEETSLKGLQFLTDANDSAAKENPVLTKMSTKVNKDQDNTKSRFRRPYPVGLSFAKDI

SEQ ID NO: 598 - DNA, 945 bp, Euphorbia esula
atggctcttcagactggcgtctccacctccaaagttctcatcctcgccggtgcagcaggtttgactagttcaattattttgagaaacggaccgttgtctgatctcgttgctcagcttcaagaattacttcagggtgttaatcaagttgagcttgctccctacaaatatgatacctcacttcttgctgctcagattcgccaattggcacaagagattaaggagttgtcgttatccaatcccgtgacaatctataatggaaatccttctactggtgggagttttgcatcttatctagtgccagctgctgcagttggagccatgggatattgttacatgtggtggaagggcttgtcagtttctgatgtaatgtttgttacaaaacaaaatatggcaaatgctgtagcaactgtgtctaagcaattggagaatgtatcagagactttatcttcaacaaagagacatctgtcaaagaggctggaaaacctggattggaaaatggaggagcagatagaaatatctaatctcatttcaaataatgtagacgatatgaaaacaaacctatcccaaattggatttgatgttgaaacaatccatcaaatgatatctgggctggaaggcaagcttgagcttctggaaaacaagcaggatgcaacaaactcaggcctctggtatctatgtcagtttgctgggggctttaaagatgagccgggcacaaaagtttataaggaactaggaactaagctagcaaacccagcagtggaatacgaggatacttctctcaagggccttcggtttatcgctgatgctaaagcgctagtttcagttgagaaaacaagaggagaacaagtggaaaaaaatgaaggcggtgaaaaaataaaaagcatgaaagcaagaatacacaggtcctatccagttggtctatctttgactcgggacttgatatga

SEQ ID NO: 599 - protein, 314 aa, Euphorbia esula
MALQTGVSTSKVLILAGAAGLTSSIILRNGPLSDLVAQLQELLQGVNQVELAPYKYDTSLLAAQIRQLAQEIKELSLSNPVTIYNGNPSTGGSFASYLVPAAAVGAMGYCYMWWKGLSVSDVMFVTKQNMANAVATVSKQLENVSETLSSTKRHLSKRLENLDWKMEEQIEISNLISNNVDDMKTNLSQIGFDVETIHQMISGLEGKLELLENKQDATNSGLWYLCQFAGGFKDEPGTKVYKELGTKLANPAVEYEDTSLKGLRFIADAKALVSVEKTRGEQVEKNEGGEKIKSMKARIHRSYPVGLSLTRDLI

SEQ ID NO: 600 - DNA, 951 bp, Ipomoea nil
atggcgatgcagaccggtgtcgctgcctccaaagttctcgtattggtcggcgcaggcttgactgggtcaatagtattaaggagtggacgattgtctgatttaatttcacagcttcaggagttgattaaaggtgtaaatgaggccgaaacatcacctgggaaatatgatgctgctcttctagctgctcagattcgacagttggcacaagagattaggcagataagtatcacaagtccagcaaccatcttcaacagtggttcttccgataggagttatgcttcttaccttcttccggctgctgcaattggagcagtgggatattgttacatgaagtggaagggttggtcattctcagatgttatgtttgttacaaagagtaatatggcaaatgctgttgcttctgtctcaaagcagttagagaatgtatctgatgcattggcttctacaaagaggcatctgtcaaaaaggcttgaaaacttggattggaagctggatgagcagaaggagatgtcaacgcttattgcaaatgatgtaaaggaagtaaagtcaaatctaaatcaaattggatacgacattgacttaattcatcagatggtgtctggattggaaggcaaaattgaacttcttgagaataaccaggatatcactaattctggtgtgtggtatttgtgccaagtggctggggagattgaaagtggtcagaatgctaagcttattgaggatgttggtgctaagttaatacagcattcaaaattgttacctatagaaaattcagtaaaggggcttcagttcattgttgaatctggtgaatcaagtgcaaaccaagatgcagacgtaaatgcaagtaaaatagctgattctccccaagtcggtgctaatcctcccaaaattgttacagctaacaaaaccaagattcacaggtcctatcgggttgggttgggttgtctttga

SEQ ID NO: 601 - protein, 316 aa, Ipomoea nil
MAMQTGVAASKVLVLVGAGLTGSIVLRSGRLSDLISQLQELIKGVNEAETSPGKYDAALLAAQIRQLAQEIRQISITSPATIFNSGSSDRSYASYLLPAAAIGAVGYCYMKWKGWSFSDVMFVTKSNMANAVASVSKQLENVSDALASTKRHLSKRLENLDWKLDEQKEMSTLIANDVKEVKSNLNQIGYDIDLIHQMVSGLEGKIELLENNQDITNSGVWYLCQVAGEIESGQNAKLIEDVGAKLIQHSKLLPIENSVKGLQFIVESGESSANQDADVNASKIADSPQVGANPPKIVTANKTKIHRSYRVGLGCL

SEQ ID NO: 602 - DNA, 954 bp, Arabidopsis thaliana
atggcgatgcaagccggtgttcagacctctaaggtccttatcctactcggcgcaggtgtatctggttcgatcgtattgagacatgggaggttgtctgacctaatagcccaacttcaagacttactcaatggtgctcaaggagttgaaagcactccttttaagtatgacggtgcactccttgctgctcagattcgacagcttgcaaacgagatcaaagaactaactatgaccaatccagttaccatctttaatggagattcaaactccagtggctatgcatcttacctggttccagcggctgccgttggagctatggggtactgctacatgtggtggaagggctggtcgttttcagatgcaatgtttgtgacaaagaaaaatatggctgatgcggttgcctctgtttcgaaacaactagacgatttgtcagacacattagcgtcaacaaggaaacatctttctcagaagctagcgaccttggattggaaggtggaagagcagaatgagacatctaaaatgatcttaagtgatgttactgagatgagatcaagcatttcgcaaattgggtttgattttaagcaacttaatgaaatgatttctggaatagaagggaagattgaaagtcttgaaagcaaacaagatgtgaccctctctggactatggcatctatgtcaagttgcaggcgttaaagacagcacaagtactaaagtatttcaggatgttggtgagagattacctattgatggaaaaccatccactaatacttctctctctggtctgcggtttctgacggaaggcaaagaggatgcaaatgtaatacacaagccggttatggcgaaagaaattatggtgatgggggaaaaaacaaaagtcactgcagcgggaagaagcagagttcatagagcgtttccaggtggaatatcttgggtacgggatgtttcaggactatcctaa

SEQ ID NO: 603 - protein, 317 aa, Arabidopsis thaliana
MAMQAGVQTSKVLILLGAGVSGSIVLRHGRLSDLIAQLQDLLNGAQGVESTPFKYDGALLAAQIRQLANEIKELTMTNPVTIFNGDSNSSGYASYLVPAAAVGAMGYCYMWWKGWSFSDAMFVTKKNMADAVASVSKQLDDLSDTLASTRKHLSQKLATLDWKVEEQNETSKMILSDVTEMRSSISQIGFDFKQLNEMISGIEGKIESLESKQDVTLSGLWHLCQVAGVKDSTSTKVFQDVGERLPIDGKPSTNTSLSGLRFLTEGKEDANVIHKPVMAKEIMVMGEKTKVTAAGRSRVHRAFPGGISWVRDVSGLS

SEQ ID NO: 604 - DNA, 957 bp, Oryza sativa
atggcgatgcagacggggttcgccacctccaaggtcctcatcctcgtcggcgcagggttgacgagctcgatcgtgctgcggaatggccggctatctgacgtgttggcggagcttcaggagcttatgaaaggtgtaaaccaaggagaaggttcgagtgcctatgacatcgcccttcttcaatctcagattcgaaatttagcacaagaagttagagatttgactatatcaaggcctattaccatattgagtggcaactccgactctggaggcagtttatcctcctacatactgcctgcagctgcagttggagcaatgggttactgctatatgtggtggaagggattgtccttatcggatgtcatgtttgttaccaaacgcaacatgaccaaagctgttgagagtatgtcgaagcaattggatcaagtgtcttcagctttagctgcaacaaaaaggcatctaagtcagcgcctggaaaatttagatgggaaaatggatgagcaagtggaggtctccaaaattattagaaacgaggtgaatgatgtcaaagatgatctgtctcaaattggatttgatattgcagcaatccaacagatggttgctggattggaagggaagatcgagttgcttgataataaacaggatgcaactaatgctggtgtatggtacctctgccaaatagctggaggtctaaaagatggaataaatgccaagttttttcaggaagctaatgaaaaactcaagctcacagagttggctcagtctgaaagaaaggcagtgaaggggcttgaatctgttctggagagcagaaaggaacaaaaggcaatcgactccaaacaaaataccaccgcgataattgacgccgaaaagcccgtgaaaacggtcgatgggcctgtgaaaagcggcgcggtgcacaggtgtagcagaatctcatttcggaaggaaggcctcgctttgtga

SEQ ID NO: 605 - protein, 318 aa, Oryza sativa
MAMQTGFATSKVLILVGAGLTSSIVLRNGRLSDVLAELQELMKGVNQGEGSSAYDIALLQSQIRNLAQEVRDLTISRPITILSGNSDSGGSLSSYILPAAAVGAMGYCYMWWKGLSLSDVMFVTKRNMTKAVESMSKQLDQVSSALAATKRHLSQRLENLDGKMDEQVEVSKIIRNEVNDVKDDLSQIGFDIAAIQQMVAGLEGKIELLDNKQDATNAGVWYLCQIAGGLKDGINAKFFQEANEKLKLTELAQSERKAVKGLESVLESRKEQKAIDSKQNTTAIIDAEKPVKTVDGPVKSGAVHRCSRISFRKEGLAL

SEQ ID NO: 606 - DNA, 960 bp, Aquilegia sp.
atggcgatgcagacgggagtaggaacttccaaagttctcgtcctcatcggcgcaggtttgactggttcggttgtattgaagagtggtcaattatcggatttgatactacagcttcaggatttaatgaatggagtgaatgatgccggagccttatctggaaagtacgatactgctctactcgcagctcagattcgatatttggcgcaagagatcagggaactgacattgtccaggcctgtaacgatcttcaatgaaaattctgggactagcgggaatcttgcatcgtacatagtgcctgctgctgcacttggagcaatgggctattgttatatgtggtggaagggattatcgcttgcagatgttatgtttgtcacaaagcaaaacatggccaatgcagttgcaaatgtctcacaacaattggagcaagtatctgcactgttaagttcaacgaaaaggcatctaagccagaggcttgaaaatttggatggaaaactggaagagcagagggaaacaacaaagctagttatgaatgaggttattggagtgaagtcagatctttttcaaattggatatgatgttgagatcatccagaaaatggtgtctggactggaagggaagattgaactcattgaaaacaaacaggatgtcaccaattcaggtctctggtacctatgccaatttgctgagggaattaaggatgggatcaatgataaacttattcaggacatcggtgcaaaacttcctcctgaccgttcaacgatggttctggaaggtacatcactaaagggccttcaattcattgtcgataccactaagtcaggagatgcggaaataacggaggagaacgttattgtacaaaatgataacaatggcatatccatgaaaaacaatataattacaaagaccagaatacacaggtcatatccaatcggtatatctttgacaactgacaagggatga

SEQ ID NO: 607 - protein, 319 aa, Aquilegia sp.
MAMQTGVGTSKVLVLIGAGLTGSVVLKSGQLSDLILQLQDLMNGVNDAGALSGKYDTALLAAQIRYLAQEIRELTLSRPVTIFNENSGTSGNLASYIVPAAALGAMGYCYMWWKGLSLADVMFVTKQNMANAVANVSQQLEQVSALLSSTKRHLSQRLENLDGKLEEQRETTKLVMNEVIGVKSDLFQIGYDVEIIQKMVSGLEGKIELIENKQDVTNSGLWYLCQFAEGIKDGINDKLIQDIGAKLPPDRSTMVLEGTSLKGLQFIVDTTKSGDAEITEENVIVQNDNNGISMKNNIITKTRIHRSYPIGISLTTDKG

SEQ ID NO: 608 - DNA, 963 bp, Hordeum vulgare
atggcgatggcgacgcacacgggggtcgccgcctccaaggtcctcatcctcgtcggcgcaggcctgacggggtcgatcgtgcttcggaatggccgcctgtcggatgtattggcggagctccaggagctcatgaagggcgtaaatcaaggagaaggttcgagcgcctatgacatggctcttatccaagctcagattcggcatttagcccaagaagtcagagatttaactttgtcaaagcccattaccatattgagtggcaaatcggactccggaggtggtttatcgtcctacatactgccagcagctgcagttggagcattaggttattgctatatgtggtgtaagggatggtccttctcagatgtcatgtttgtcacaaaacgcaatatggccagtgctgtcgatagcatgtcgaagcaattggagcaagtttcttcagcgctagcagcaacgaaaagacatttaacaaaacgccttgagaatttggatggcaaaatggacgagcaagtggaagtctccaaacaaatccggaatgaggtcgttgatgttaaaactgatctgtctcaaattggctttgacgttgaagcaattcaacagatggtagccggattggaagagaagatcgagctgcttgacaacaagcaggatgcggctaatgctggtatatggtacctctgccgaatggcaggaggtataaaagagggaataaatgccaagtttttccaagaagcggatgaaaaactcaagctcttggacctggctcaaactgaaaagaagccggtgaagggtctcgaattgtttctggagagcaccaaggaggtaaaggcactcgactccaagcctaagaccatcgtgcagaacgacgccaagaaaccgacgaaaacgttcgatgtgcccataaaaagtgctgcggtgcacaggtcaaacaggttcttaattcgtaaagaaggcctcgtgctgtga

SEQ ID NO: 609 - protein, 320 aa, Hordeum vulgare
MAMATHTGVAASKVLILVGAGLTGSIVLRNGRLSDVLAELQELMKGVNQGEGSSAYDMALIQAQIRHLAQEVRDLTLSKPITILSGKSDSGGGLSSYILPAAAVGALGYCYMWCKGWSFSDVMFVTKRNMASAVDSMSKQLEQVSSALAATKRHLTKRLENLDGKMDEQVEVSKQIRNEVVDVKTDLSQIGFDVEAIQQMVAGLEEKIELLDNKQDAANAGIWYLCRMAGGIKEGINAKFFQEADEKLKLLDLAQTEKKPVKGLELFLESTKEVKALDSKPKTIVQNDAKKPTKTFDVPIKSAAVHRSNRFLIRKEGLVL

SEQ ID NO: 610 - DNA, 963 bp, Populus trichocarpa
atggctttgcaggcaggggtctccacctccaaggttctcattctcgtcggtgcaggtttgactagttcgattattttgaaaaatggacggttgtctgaactcattgggcagcttcaagaattactcaagggtgttgatcaagttgagatcgccccctacaaatacgatagcgctcttcttgcagcccagattcgtcaattggcgcaagagattaaggagttgaccttatccagtcctgtaaccatctacaatggaaattctgcttctagtgggagtttttcatcttacctagtgccagctgctgctcttggagcaatgggatattgttacatgtggtggaaggactggtcattttcagatgtaatgtttgtaacaaagaaaaatatggcaaatgctgttgcaactgtgtcaaaacaaatggagaatgtatcagaaacattggcttcaaccaaaagacatctaacaaaaaggctggaaaatctggactggaagattgaggagcagatagaaacatctaagctcattgccagtgatgtagatgagatgaaatcaaacctttcccaaatcggatatgatgttgaatcaatccatcaaatgatatctggcctggaaggaaagcttgaacttctcgaaagcaaacaggataccacaaactctggtctctggcacctatgtcaatttgctggaggctttaaagatgggcttggtactcaagtttatcaggatgttggtgctaagctagcgaaccctccagcaatggcatatgaagaaaggtctctaaagggtcttcaatttattgctgaaaccaaagagtcggataaggttgagaaaccagtagaaaatgtgaagaatgatcttcatatctaccctggtgaaaaagtcaaaactgtgaagacgagagtacacaggtcatatccggtcgggttttctttgacccgagacattgtcggatccggcatatag

SEQ ID NO: 611 - protein, 320 aa, Populus trichocarpa
MALQAGVSTSKVLILVGAGLTSSIILKNGRLSELIGQLQELLKGVDQVEIAPYKYDSALLAAQIRQLAQEIKELTLSSPVTIYNGNSASSGSFSSYLVPAAALGAMGYCYMWWKDWSFSDVMFVTKKNMANAVATVSKQMENVSETLASTKRHLTKRLENLDWKIEEQIETSKLIASDVDEMKSNLSQIGYDVESIHQMISGLEGKLELLESKQDTTNSGLWHLCQFAGGFKDGLGTQVYQDVGAKLANPPAMAYEERSLKGLQFIAETKESDKVEKPVENVKNDLHIYPGEKVKTVKTRVHRSYPVGFSLTRDIVGSGI

SEQ ID NO: 612 - DNA, 963 bp, Triticum aesticum
atggcgatggcgacgcacacgggggtcgccgcctccaaggtcctcatcctcgtcggcgcaggcctgacgggatcgatcgtgcttcggaatggccgcctgtcggatgtattggcggagctccaggagctcatgaagggcgtaaatcaaggagaaggctccagcgcatatgacatggctcttatccaagctcagattcggcatttaggccaagaagtcagagatttaactttgtcaaagcccattaccatattgagtggcaaatcggactcgggaggcagtttatcgtcctacatactaccagcagctgcagttggagcattaggttattgctatatgtggtgtaagggatggtccttctcagatgtcatgtttgtcacaaaacgcaatatggccagtgctgttgatagcatgtcgaagcaattggagcaagtttcgtcagcactagcagcgacgaaaagacatctaacaaaacgccttgagaatttggatggaaaaatggacgaacaagtggaggtctccaaacaaatccggaatgaggtcacggatgttaaaactgatctgtctcaaattggctttgacgttgaagcaattcaacagatggtagctggactggaagagaagattgagttgcttgacaataaacaggatgcggctaatgctggtatatggtatctctgccgaatggcaggaggtataaaagagggaataaatgccaagtttttccaagaagcggatgaaaaactcaagctcttggacctggctcatactgaaaagaagccggtgaagggtctggagttgtttctggagagcaccaaggaagccaaggcactcgactccaagcctaagaccatcgtgcagaacgatgccaagaaaccgatgaaggcgttcgacgtgcctgtgaagagtgctgcggtgcacaggtcaaacaggttcttaattcgcaaggaaggcctcgcgctgtga

SEQ ID NO: 613 - protein, 320 aa, Triticum aesticum
MAMATHTGVAASKVLILVGAGLTGSIVLRNGRLSDVLAELQELMKGVNQGEGSSAYDMALIQAQIRHLGQEVRDLTLSKPITILSGKSDSGGSLSSYILPAAAVGALGYCYMWCKGWSFSDVMFVTKRNMASAVDSMSKQLEQVSSALAATKRHLTKRLENLDGKMDEQVEVSKQIRNEVTDVKTDLSQIGFDVEAIQQMVAGLEEKIELLDNKQDAANAGIWYLCRMAGGIKEGINAKFFQEADEKLKLLDLAHTEKKPVKGLELFLESTKEAKALDSKPKTIVQNDAKKPMKAFDVPVKSAAVHRSNRFLIRKEGLAL

SEQ ID NO: 614 - DNA, 966 bp, Solanum tuberosum
atggcgttgcaaaccggcatcgccacttccaaagtactcatactcgtcggcgcaggtttgactgggtcagtaatattgaaaagtggacgattatctgatctgatctcgcagcttcaggaggtgataaatggcgtgaatgcagctgagacatctcctggtaaatatgacactgctcttctagcagctcagattcgacaattagcacaagagatccgggagatgagcatatcaaatccaattactattttcaataaggattcttcctccagtgggagctatggttcttacattcttccagctgctgcagttggggcaatgggatattgttacatgaagtggaagggttggtcattttccgatgtaatgtatgtgacaaagcataatatggcgaatgctgttgcatctgtgtctaagcagttggagaacgtatctgatgcattggcttctacaagaagacatttgactaagaggctggaaaacttggactggaagctagatgagcaaattgagatatcaaaccttattactaatgatgtgagagatgttaaggctaatctaaatcaaattggtttcgatataaacttaatccatgagatggtgtctggattggaagggaagattgagcttcttgagagtaaccaggatgtgactaattctggtttgtggtacttgtgccaagctgctgggggcattaaggatgttcaaaatactaaggttattcagggcatcgaggctaagctgatagagcattcaaaggtgactcccaaggaaaattctgtgaaggggcttgaattcattgtcgaatctaatgattcaagtgtgccaccaaaatcggttatggatacagaaggaaaagatattattgacaattttgccaaaggtccagttgctagcaaaatgaggattcacagatcttatccagttgggttgtctttaacaaggagcgtgctgggtccaggattctga

SEQ ID NO: 615 - protein, 321 aa, Solanum tuberosum
MALQTGIATSKVLILVGAGLTGSVILKSGRLSDLISQLQEVINGVNAAETSPGKYDTALLAAQIRQLAQEIREMSISNPITIFNKDSSSSGSYGSYILPAAAVGAMGYCYMKWKGWSFSDVMYVTKHNMANAVASVSKQLENVSDALASTRRHLTKRLENLDWKLDEQIEISNLITNDVRDVKANLNQIGFDINLIHEMVSGLEGKIELLESNQDVTNSGLWYLCQAAGGIKDVQNTKVIQGIEAKLIEHSKVTPKENSVKGLEFIVESNDSSVPPKSVMDTEGKDIIDNFAKGPVASKMRIHRSYPVGLSLTRSVLGPGF

SEQ ID NO: 616 - DNA, 585 bp, Euphorbia esula
atggctctacctttcggcaagttaggcatccttattggagcaggtattcttggctcggttcttgcaaaagaggggcggttgccgagtatttctgacgtggtttcaggtgcatttaagtttggtttgaagattaaaggagatgactctgcttcatcagttagaaagccacataacgaccccttaatggctcaggttaacagccttcgggaggagctgcaaatgttagtatcaaacagaccaatgaccattataactacaagtgggcaaggtgcaaataaatatggaacaattgttgttgtgattatagttggctatggttatgtttggtggaagggttggaagctacctgacatgatgtttgcaacaagacgaagtctatctgatgcttgtacttctatagctcatcaacttgagaatgtttatggatcaatcaggaataccaggagggaattatcttcagatattagtcgtgtggactctaatttggatgagatagcttcactcactgctagcacacaagaaaaggttactgagctgttagaagatttcaggaaggattggtcacgatgttcgatatgttcgtga

SEQ ID NO: 617 - protein, 194 aa, Euphorbia esula
MALPFGKLGILIGAGILGSVLAKEGRLPSISDVVSGAFKFGLKIKGDDSASSVRKPHNDPLMAQVNSLREELQMLVSNRPMTIITTSGQGANKYGTIVVVIIVGYGYVWWKGWKLPDMMFATRRSLSDACTSIAHQLENVYGSIRNTRRELSSDISRVDSNLDEIASLTASTQEKVTELLEDFRKDWSRCSICS

SEQ ID NO: 618 - DNA, 663 bp, Lactuca sativa
atggcacttcctctggggaagctgacgttaatcattggagcaggccttgttgggtcagttcttgctaaagaaggacgcttgccaagcgtatatgatgttttctccggtgcctcaaaggtacttaaaatgattggaaacgatgataaacctacatcaaccccaaaaagacacagtgactcgttaatggcacaggtgaacagcctaaggcaggagctacaactcctggcatcaaatagacctgttaccattgtgaccaccaatggttcatcaggtgctaacaaatatggtgtcattatcattgttgttgtcgttggatacggatatgtttggtggaagggttggaagcttcctgatatgatgtttgctacaaaacgaagcttatctgatgccacaagtgctgtagctaaacagcttgacactgtctactcatcacttgcagctaccaagagacatttatctacaaggattgatcgtgtggatagcagtttagatgaggttgcagaacttacagctgctacaaaagaggaggtttctttaatacgtggggatacaaaagtgattgctctagatgttcaatctgtacataatgctgtttacaccctggagagtaagcttagtaggattgaaattgaaacaggacgacacaaacctaggagtggctaa

SEQ ID NO: 619 - protein, 220 aa, Lactuca sativa
MALPLGKLTLIIGAGLVGSVLAKEGRLPSVYDVFSGASKVLKMIGNDDKPTSTPKRHSDSLMAQVNSLRQELQLLASNRPVTIVTTNGSSGANKYGVIIIVVVVGYGYVWWKGWKLPDMMFATKRSLSDATSAVAKQLDTVYSSLAATKRHLSTRIDRVDSSLDEVAELTAATKEEVSLIRGDTKVIALDVQSVHNAVYTLESKLSRIEIETGRHKPRSG

SEQ ID NO: 620 - DNA, 801 bp, Physcomitrella patens
atggccacatctaggttgctgttggttgtgggtgctggaactgctggatcattggctttgcggaacccgaaagtcgccgagcttctgaacgatctctcccaggtcgtaaccaagcacctttccgaagaggacggatcagggggcgaaaattctgccctagctgcccaagttcagcgtctgacacaagagcttcgatatcttgcatcatcacccagaaatgttacggtggtcaacggtggttcttccaccaattactcttcactaatactacccgctgcaactataggaattgtcggttacgggtacatcaagtggaaagggctaaaatggacagacttcatgtatgtcacaaggaagcacatgactaatgccgtcgcaagcgtctcaaagcagcttgagactgtatccactgcccttcaggcaactaaacgacaattgaccgctaagctggaaggcgtgaccaagagcttggatgacagtatgatcttgcaaggcctgattagaaatcaagtgaccgaggtgcagagcgaggttgtgagagctaatggagagattggtgaagtgcagcgactcgtattgggactagaagggaaaattgacgaggtccaggctaaccaagaaattgccaatcagggcatcgtattgctttgcaggtacgcatctcaacctcctcgactttctccaaattcctgtccgatcatcattaaacagctgcttatgtatggaaggctttttctttttcaattttttactctccttcctttcttgtgtgctcattacggtggctgtgcaggtttgtag

SEQ ID NO: 621 - protein, 266 aa, Physcomitrella patens
MATSRLLLVVGAGTAGSLALRNPKVAELLNDLSQVVTKHLSEEDGSGGENSALAAQVQRLTQELRYLASSPRNVTVVNGGSSTNYSSLILPAATIGIVGYGYIKWKGLKWTDFMYVTRKHMTNAVASVSKQLETVSTALQATKRQLTAKLEGVTKSLDDSMILQGLIRNQVTEVQSEVVRANGEIGEVQRLVLGLEGKIDEVQANQEIANQGIVLLCRYASQPPRLSPNSCPIIIKQLLMYGRLFLFQFFTLLPFLCAHYGGCAGL

SEQ ID NO: 622 - DNA, 849 bp, Vitis vinifera
atggctctccctctcggaaagcttaccctcctcgtcggtgcaggtattgttgggtcagttcttgcaaaagaagggcgcatgtcggatgtctctaattttttctcaggtgctttcaagattgctttaaagcaacttaaacaagatgattcaacctcaccaactgtcaagcctaagaacgatgctttgctggctcaggttaatagcttgagacaggagttgcaaatcttggcatcaaatagatcaattacaattgtaactgcaagtggaacaggtaaaagcaaatatggtgtagtggttattattgtcgtagtaggatatggctatgcctggtggaagggctggaagcttcctgatatgatgtttgcaacgaggcgtagtttatcagatgcttgctcttcaattgctaaacagcttgagaatgtttattcatcaattgcagcaaccaagaggcatttatcttccagaattgaccgtgtcgattgtagtatagacgagtttgcagaacttacttctgctaccaaggaggaggtctttgaactacgaggtggcatgaagatgatcggtggggatgttgcatctgttcagaaagctgtccaaaatctggagagtaaaataattgaaatagaagggaagcaggatatcacaaacgaaggactagggagactctgtcattatgcctggaacttggaaaatagcagaacaacagagcggattcaggcatggactgaacttctactctttcttctgtgttttcttgtaatagttttctatttccggttttgctttttactatttgtgagacttaataatctttttgtgagaccacacgatataatttttcctgtttga

SEQ ID NO: 623 - protein, 282 aa, Vitis vinifera
MALPLGKLTLLVGAGIVGSVLAKEGRMSDVSNFFSGAFKIALKQLKQDDSTSPTVKPKNDALLAQVNSLRQELQILASNRSITIVTASGTGKSKYGVVVIIVVVGYGYAWWKGWKLPDMMFATRRSLSDACSSIAKQLENVYSSIAATKRHLSSRIDRVDCSIDEFAELTSATKEEVFELRGGMKMIGGDVASVQKAVQNLESKIIEIEGKQDITNEGLGRLCHYAWNLENSRTTERIQAWTELLLFLLCFLVIVFYFRFCFLLFVRLNNLFVRPHDIIFPV

SEQ ID NO: 624 - DNA, 873 bp, Centaurea solstitialis
atggctcttcctcttgggaagctgacgattatcattggagcaggccttgttgggtcagtgcttgctaaagaaggacgcatgcctggtgtctctgatttattttctggtgcttcgaaggtacttaaattaataagaacagatgagaaacccagttcaaatccaaaaccacacagtgattcattaatggcgcaggtcaatagcctaaggcaagagctgcaactcttggcatctaatagacccgttaccattgtgacttctggtggttcagcaggtcctggcaaatacggtatgattgtcatcgttgttgtcgtaggatatggatatgtttggtggaagggttggaaacttcctgatatgatgtttgctacaaagcgcagtttatctgatgcaacaaatgccgtagctaaacagcttgacaatgtctactcatctcttgcggctaccaagcggcatctatcttcaagaattgatcgtgtggattgtagtttagatgagtgtgcagagattgctgcttctacaaaagaggaagtctctgcattacgaggagataccaaattgattgctttggatgtacaatctgtacataatgcagtttactccctggagagtaaactgagtaggattgaagggaaacaggataatacaaatctcggagtggcaaagctgctacgtactgccttaacactcgagcaacaggcatctgcggaccgcatccagggaaacccatccagttcatcaacgccagctctcgaattgccacaaagggctttgtctttgccaccagttcaaatagaggaactacagttatctcctccagtgtctcccaagccaagcgacctctcgaaagtaccctctctgctgcatctggcttga

SEQ ID NO: 625 - protein, 290 aa, Centaurea solstitialis
MALPLGKLTIIIGAGLVGSVLAKEGRMPGVSDLFSGASKVLKLIRTDEKPSSNPKPHSDSLMAQVNSLRQELQLLASNRPVTIVTSGGSAGPGKYGMIVIVVVVGYGYVWWKGWKLPDMMFATKRSLSDATNAVAKQLDNVYSSLAATKRHLSSRIDRVDCSLDECAEIAASTKEEVSALRGDTKLIALDVQSVHNAVYSLESKLSRIEGKQDNTNLGVAKLLRTALTLEQQASADRIQGNPSSSSTPALELPQRALSLPPVQIEELQLSPPVSPKPSDLSKVPSLLHLA

SEQ ID NO: 626 - DNA, 954 bp, Selaginella moellendorffii
atggcagtgcaggccggaatggcgacatccaagctcatcattctccttggagcagggatgactggctcgattcttataaagaatgggaagctctcggatttcttcaaggatcttagcaaggttttctcgaagcacttgaaagaggatgacaaggatgaagtgacggaaacgctggcacagcaagtccagcgcttgaccaacgatctaagacagttagctggctccaggaacatcacggttgtgaatgctcctggcacctctgggcagtcaagtaatctttcctctctcgccatgcctgcgctcgtcattggtgttgctggatatggatacttttggtggaagggctggtcatggacggatgtcatgtatgtcacccgtcgaaacatgtcgaatgtggttgcgagcgtgtcaaagcaactagatcaagtctcggccgctgttacggcaacgaaacggcatctaacttcacggattgattcggtctcgaaaactctggacgacagtgttgcggttcagggattgataaagaacgaggtgtttgaaattcgtggagatgtggctcgtgttggcggggatattggagctgtacaacaaattgtcgagggcttgggcaatcagctcgacgatgtacaaaccaagcaggactttacaaaccaagggattatcttgctttgtcaatttgcaaggagatgggaagagactaggcgccaagaactgcctgggatttctcccatcttgagtttgcagaacggtgaagccaagcccgctagcggtgtcgacagcattctacaggggctacctccgctgcctaaagcacgtctagagcgatcggcatccgctactggttcaggactgaagttcatctccgatgcgctttctggaaactctggcgatagctccaagctccagaggacattgacaccgaacttgtcattcaggctgcaaaagacttga

SEQ ID NO: 627 - protein, 317 aa, Selaginella moellendorffii
MAVQAGMATSKLIILLGAGMTGSILIKNGKLSDFFKDLSKVFSKHLKEDDKDEVTETLAQQVQRLTNDLRQLAGSRNITVVNAPGTSGQSSNLSSLAMPALVIGVAGYGYFWWKGWSWTDVMYVTRRNMSNVVASVSKQLDQVSAAVTATKRHLTSRIDSVSKTLDDSVAVQGLIKNEVFEIRGDVARVGGDIGAVQQIVEGLGNQLDDVQTKQDFTNQGIILLCQFARRWEETRRQELPGISPILSLQNGEAKPASGVDSILQGLPPLPKARLERSASATGSGLKFISDALSGNSGDSSKLQRTLTPNLSFRLQKT

SEQ ID NO: 628 - DNA, 1032 bp, Arabidopsis thaliana
atggctattcctctcgggaagctcaccatcctcatcggtgcaggtcttgttgggtcagtacttgctaaagaagggagtttaccagatgtctcgagttttgtctccggtgctcttaagatggtatttaggcagctgaagcaagaagaacctgccaaatcagccagcaagccccgcaatgatacactaatggcccaggttaacagtcttaggcatgaattgagcttgctttcttcaaacagacctatcactattgttaccacagcaggatcaggtggtaaaaagtatggttacatcattataattggggtgataggctacggatatgtatggtggaagggctggaaacttccggatcttatgtttgcaacaaggcgcagcttatcagatgcatgtaatagtgttggcagccagatcgatggtttttacacatcactctcgggtaccaaaaaagagttaagttcaaaaattgacgggatgggtcgtagtttggatgctaatacagaaattattcaagatacaggacgagaggtgatggaactacaaagaggtacggaaaatattaaggatgacgttaagtttgttttcgatgctgttgaaaatctggcaagcaaagtctatcgtattgagggaaatcaggatattacacttaaaggagtcggggcgctgcatgctcaggttcgggagaacaaaagaattcaagagtccaataaggctttaccatcaacttcagcagtgccagcccttgaggcagctcctatgacaccatcgtcaaggactttgtctttgcctcctgcttctccccgtgaatctcagtcgccttcaacttctaatggagctcaacagtcacgtggtccacttcagcacactcaatctatgtctggtttgaaggagataagcgaaaatggaacacattctggagaaactacgggaaacacgagttctggcctgtttagtattttctcaataccaagaatagggaggactcgaagtgtggtcaacacagtgcctactaactccattggaccccaatag

SEQ ID NO: 629 - protein, 343 aa, Arabidopsis thaliana
MAIPLGKLTILIGAGLVGSVLAKEGSLPDVSSFVSGALKMVFRQLKQEEPAKSASKPRNDTLMAQVNSLRHELSLLSSNRPITIVTTAGSGGKKYGYIIIIGVIGYGYVWWKGWKLPDLMFATRRSLSDACNSVGSQIDGFYTSLSGTKKELSSKIDGMGRSLDANTEIIQDTGREVMELQRGTENIKDDVKFVFDAVENLASKVYRIEGNQDITLKGVGALHAQVRENKRIQESNKALPSTSAVPALEAAPMTPSSRTLSLPPASPRESQSPSTSNGAQQSRGPLQHTQSMSGLKEISENGTHSGETTGNTSSGLFSIFSIPRIGRTRSVVNTVPTNSIGPQ

SEQ ID NO: 630 - DNA, 1032 bp, Gossypium hirsutum
atggctcttcctcttggcaagttatctatcatcgttggtgcaggtattgttggttcaattcttgcgaaagaaggacgcatgtcaggtgtttctgattttgtctctggtgctttcaagattgcttttcggcaacttaagcatgatgattccactccgtcaaacaagccgcgaaatgactatttggtggctcaggttaacagcctaaggcaggaactgcaaatcttggcatcaaatagaccaattacaattgttaccggacaaggaacaggtactagtaaatacagcataatcattgttgttgtcgttgttggatatggctacgtttggtggaagggctggagacttcccaatatgatgtttgcaacgaggcgtagtttatctgatgcacgtgatgccatagctaagcagcttgagagtgtttactcgtcaatctcggctaccaaacggcaactatcctcaagaattgagggtgtggataatcgtctacatgaaattgcagatattactgctacaacacatgaagaggttactctactacaagatcaatcaaagaagctcaacactaatgttcaatccgttcgatatgtagttcaaactctggaaagtaagataaaaaggatagaagggaagcaggatatgacaaatgaaggagtcaactggttgtgtgattatgcccagaccatacaacaaaatagacccactgatcatactcaggctttaccagctaactcttccaggccagctcttgaagccccaacgaaaacaccatcaaggagtgggtctttgcctcccattttaccggtagaaccgccgtctccatcttctggttcttctaatggaactcccaaggttcggagatctcctaaacatgtaatctctgcctcaggccttaaggaattaggtgaatcaagtgccaataatgttggcaacaacgggacagtgttttctggtctgagtggtttgttttctgttctgacaaggactcgcagcgcaacaaatgcaccaatgggaggatcgagtggacaacaatag

SEQ ID NO: 631 - protein, 343 aa, Gossypium hirsutum
MALPLGKLSIIVGAGIVGSILAKEGRMSGVSDFVSGAFKIAFRQLKHDDSTPSNKPRNDYLVAQVNSLRQELQILASNRPITIVTGQGTGTSKYSIIIVVVVVGYGYVWWKGWRLPNMMFATRRSLSDARDAIAKQLESVYSSISATKRQLSSRIEGVDNRLHEIADITATTHEEVTLLQDQSKKLNTNVQSVRYVVQTLESKIKRIEGKQDMTNEGVNWLCDYAQTIQQNRPTDHTQALPANSSRPALEAPTKTPSRSGSLPPILPVEPPSPSSGSSNGTPKVRRSPKHVISASGLKELGESSANNVGNNGTVFSGLSGLFSVLTRTRSATNAPMGGSSGQQ

SEQ ID NO: 632 - DNA, 1047 bp, Arabidopsis thaliana
atggctcttccgctcgggaagctcaccatcctcatcggtgcaggtcttattggatcagcattttctaaagaagggggcttaccagatgtctccaatttggtttctggtgcttttaagatggtattcaggcaactgaaacaagacgaacctagcaaatcagctagcaaaccccacgatgatgtacttgtggcccaggttaacagtcttaggcatgagatacagttgctggggtcaaacagacctatcaccattgtttcaccttcaggatcaggtggtagaaactatggtttgatcattatcgttggggtgataggctacggatatgtgtggtggaagggctggaaacttccagattttatgtttgcaacaaggcgtagcttatcagatgcatgtaataatgttggcaaccagatcgatggtttttactcatcactcaagggtacaaaacgagagttaagttcagaaattgatatgatgggtcgtcgtttggatgcaaatacagaagtaattcaagaaacaatacaagaggtggctaagctacaggatggtacatcatttataaaggatgacgttaaggctgttttcgatgcttttgaaaatctggcaagcaaagtgtgtcgtatagagggaaatcaggatatcacacttagaggagttggggctctgcatgctcagtgtcaggagaaccaaagaattcaagagtccaataaggctttgccatcaacttcatcactgccagcccttgaggcagctcctatggcaccctcttcaaagactctgtctttacctcctgcttctcccgatgaatcccagtccccgtcaacccctaatgtagctcaaaagtcacggggcctacttcagcacactcaatctatgtctggtttgaaggacataaatgaaagctctagtagccacaacacgtcttcaaatggaatatattttgggggaaacggtgcatcaggatcgagttcgggcgtgcttggtaggttctcaatagcaagaataatgaggactcgtactgtggtcaacacagtgtctactaactga

SEQ ID NO: 633 - protein, 348 aa, Arabidopsis thaliana
MALPLGKLTILIGAGLIGSAFSKEGGLPDVSNLVSGAFKMVFRQLKQDEPSKSASKPHDDVLVAQVNSLRHEIQLLGSNRPITIVSPSGSGGRNYGLIIIVGVIGYGYVWWKGWKLPDFMFATRRSLSDACNNVGNQIDGFYSSLKGTKRELSSEIDMMGRRLDANTEVIQETIQEVAKLQDGTSFIKDDVKAVFDAFENLASKVCRIEGNQDITLRGVGALHAQCQENQRIQESNKALPSTSSLPALEAAPMAPSSKTLSLPPASPDESQSPSTPNVAQKSRGLLQHTQSMSGLKDINESSSSHNTSSNGIYFGGNGASGSSSGVLGRFSIARIMRTRTVVNTVSTN

SEQ ID NO: 634 - DNA, 1056 bp, Glycine max
atggctctttcactcggcaagctcgtcattctcgtcagcgcaggaattgctggttcagtaattgcaaaagaagggcgtctgccagatgtctctggtctcgcctctggtgcttttaaggttgttttgaggcaacttaaaagcgatgatcctgctccaactgttaaaaagcagccgcataatgatgctttgttggctcaggtaaacagtcttcggcaggaactgcaacttcttgctagagatagatcgatcactattgtaaatgcaagtggaacaggtggaagaaaatatataacagtgattgttattgttgtggtaggatatggatacgtttggtggaagggatggaagcttcctgatctgatgtttgcaacaaggcgtggtttgtctgatgcttgcacatctattggtaatcagatgggaaagctttatgaatcaattggggataccaaaaagaaattatctgcaagaatcaacggtctggataaaaatttagaagaatgtgctgccattactgaaagtaccagggaggatatatctgtaattcaacgtaaagcagatacgataagtgaagattcaaagtcttttcatgtcgcagtccatgttctggaatctaaaattaaagaaatagaagagaagcaggtggccacaattgaaggagtgaacatgttgtgtcaatttaccaagactttggagaatagcagatccacagagtatattcaggcatcttcatccagttcttccaggccagcccttgagccaccaccagtttcaccctcttccagttccagggggtcacagtcaggttccgctaggctatctcttgagccaccatcccttacaccatcatcaaggactgcatccttgccaccgacattgccaactgatccaccatctccatcgaattctggtggatctttccaggggccaaaagtagacaaaagcaatggatctagttctggcttgtttgggttgatatctggtgtctatggtccattgctgacaagaactcgcagtgcgacagatgcagtagtccaaaaaactcgttcggctagttaa

SEQ ID NO: 635 - protein, 351 aa, Glycine max
MALSLGKLVILVSAGIAGSVIAKEGRLPDVSGLASGAFKVVLRQLKSDDPAPTVKKQPHNDALLAQVNSLRQELQLLARDRSITIVNASGTGGRKYITVIVIVVVGYGYVWWKGWKLPDLMFATRRGLSDACTSIGNQMGKLYESIGDTKKKLSARINGLDKNLEECAAITESTREDISVIQRKADTISEDSKSFHVAVHVLESKIKEIEEKQVATIEGVNMLCQFTKTLENSRSTEYIQASSSSSSRPALEPPPVSPSSSSRGSQSGSARLSLEPPSLTPSSRTASLPPTLPTDPPSPSNSGGSFQGPKVDKSNGSSSGLFGLISGVYGPLLTRTRSATDAVVQKTRSAS

SEQ ID NO: 636 - DNA, 1062 bp, Sorghum bicolor
atggtgcttggcaaggtcgccatcgtcatcggctcaggaatcgtcggatcagtactcacaggcggtgagtctggccttcccgacttcagggatgcaatctctggtgctttcaagttcttgaccaagggtgcaaagcaaggcaaggatgggccatcgaccagcagtccacatactgctcagttgttgacccaggtcaatcatctcagagaggagcttcagatgttgtctaaatcaaatcatgttgctattgtcactgttgatggtagacctggccctggtgcatatggtataacagctgttgttattggagctattggctatttattcataagatggaaggggtggaaactttctgatatgatgtttgtgacaaagcgtgggttatcagatgcttgcaatgtagtggggaaacaagtggatcaggtttcagaaagtgttaatgttgcaaagagacatcttgccggaaggattgatcgtgtagattgtagtttagatgaatgccgagaaattacagaagccacaagggaagaggttacaatcatccatggagatctaagtgccttccagaaggaaatggaaacagttcatcttgtagttcgtagtttggagacaaagcttgggcgcctagcttatactcaagaccggacaacacgaggaatatatgacttgtgtgagttcactaaaaaattggatcagagcccgaaagctgatattcgccaggttacatcatcaactcctcgtcctgctattgaatcctcagagagaattgttagggctgcttctttgcccccggctatggaaacagagtctcctagaatagaggcatctaaggttgtgcgctcatctacaatcatgtcagcatcaggacttagtttgctagctggaactacaataccacctaaaagagatcaaccgggtgctttcagcagagcaagttcaatgaaggaaggaccctctgaattatcgagtggtgtgcaaaattcagcagaaccaagccccaggagatctggcgcttcaaccctgtttggagggcttgggtttctaaggagctacaccagctga

SEQ ID NO: 637 - protein, 353 aa, Sorghum bicolor
MVLGKVAIVIGSGIVGSVLTGGESGLPDFRDAISGAFKFLTKGAKQGKDGPSTSSPHTAQLLTQVNHLREELQMLSKSNHVAIVTVDGRPGPGAYGITAVVIGAIGYLFIRWKGWKLSDMMFVTKRGLSDACNVVGKQVDQVSESVNVAKRHLAGRIDRVDCSLDECREITEATREEVTIIHGDLSAFQKEMETVHLVVRSLETKLGRLAYTQDRTTRGIYDLCEFTKKLDQSPKADIRQVTSSTPRPAIESSERIVRAASLPPAMETESPRIEASKVVRSSTIMSASGLSLLAGTTIPPKRDQPGAFSRASSMKEGPSELSSGVQNSAEPSPRRSGASTLFGGLGFLRSYTS

SEQ ID NO: 638 - DNA, 1071 bp, Oryza sativa
atgttcacatgttcttttctttttctttccttattattatttgtcatggtcttggctgggatactatgcactgctgattatcattatgttgttcactgcattataaaggttcttggacatgtgaaagtttttatagttattgctaataaactttcatcatgctcttttgcctttaaacatacacaattacatatggttacacacattctttctcaaatttccttaaacgacattcatgtaaatcctttttctgtaggacctggtacatttactataacagtggtggctgttgctggggctgttggctacgcctacattaagtggaagggctggaaactttctgatttgatgtttgtcacgaagcgtggcttatccgatgcttgcaatgtagttggcagccaattggacaaggtttcagatgatgtcacttctgcaaggaaacatctcgctggaaggattgatcgtgtggatatcagtttagatgaaacacaagaaattattgaagggacaagggatgaggtcacagtcatccatggggatcttagtgctttccaagaggatttacaatcagttaaccttgtagttcggagtctggaatcaaagctcgtgagtctggaatacacccaggatcgtacggctaatggaatatctgacttggttgagttcacccagaaagccactattcgtcaggtcccagcagcatccgttcctccagctattggatcttcagagctagttgttaggagggtttcttcgttgcctcaatctactgctcttccagttctgccgacaaccacacctgcagctgaaccatcacctagggcagaggcaccacaggaggaacagtggggttttgtgagcagaacatcatcttgtagggaaggatcaggtcgttttcaggagcagcggagtgttgtgaccagaacgtcgtctattagggaaggatctcctgaatcttcaaatggagcctcatcctcaactggagcaagcacaggaacgaacacaagcacgagcagatttggtgggctgaggctgcctggacttgggtttcttgcaagttcgacgagatag

SEQ ID NO: 639 - protein, 356 aa, Oryza sativa
MFTCSFLFLSLLLFVMVLAGILCTADYHYVVHCIIKVLGHVKVFIVIANKLSSCSFAFKHTQLHMVTHILSQISLNDIHVNPFSVGPGTFTITVVAVAGAVGYAYIKWKGWKLSDLMFVTKRGLSDACNVVGSQLDKVSDDVTSARKHLAGRIDRVDISLDETQEIIEGTRDEVTVIHGDLSAFQEDLQSVNLVVRSLESKLVSLEYTQDRTANGISDLVEFTQKATIRQVPAASVPPAIGSSELVVRRVSSLPQSTALPVLPTTTPAAEPSPRAEAPQEEQWGFVSRTSSCREGSGRFQEQRSVVTRTSSIREGSPESSNGASSSTGASTGTNTSTSRFGGLRLPGLGFLASSTR

SEQ ID NO: 640 - DNA, 1074 bp, Aquilegia sp.
atggctcttgcccttgggaaggtcaccatccttatcggtgcagggcttcttgggtctgtgctcgcaagggagggaggcatgacaagtgcctcaaacttcatttctggcgctatcaagtttgtgaagcttgttaaacaagatgactcgtctccgtcagttagtaaaccacgaaatgactctctaatcgcgcaggtaaaagacctacaaaagcagctgaaagacttggtggacaataggccagttataattcggactgggggaagctcaggtgttaaatcctatggagtccctgttttcagtgtggttgttgtgggaacagcttatatgtggtggaagggttggaagctttctgacttgatgtttgcaaccaggcgtggtttagcagatgcttgctcatctgtaggcaaacaattagaccaagtgtcctcatctgtgaaggctacaaggcagtttctgtcatcaagaattgaccgtgttgatgtgactcttgatgaatgtgcagagcttacagctggcacgaaagatgaggttttccaactgcgtggagatatgaaggtgttttcggtggatgtagaatctgttcatcgtgcagtccaaactctggaaacaaaaattggtagaatagaagagaagcaggacatcacaactcatggagttcgtgttttgtgtgattttgtccataccgttgaaatgggcaggaccggagcgtctattcaggcatcaccgtccagtttctcgaggcctgcactaatgacaaccgcttcaagatctaactccttaccgcccaaagttctgtctctggaatcgccatctccatcttcaactgatgaagttcccaaggtaaagctcccattgcaaagtactgtctcagcatcaggcttgaaggaatttgagggactgtcaggtgccaccatgactgtagccaagtctgaggtcccaaatgatagttcgtctgcggatccaaagagcaatggcacttcgagttcgagtcgttttggatggaagctccccagtctaaatgcatctttcctttccagaaccaatagtgcaactttgtccttcaataatatatag

SEQ ID NO: 641 - protein, 357 aa, Aquilegia sp.
MALALGKVTILIGAGLLGSVLAREGGMTSASNFISGAIKFVKLVKQDDSSPSVSKPRNDSLIAQVKDLQKQLKDLVDNRPVIIRTGGSSGVKSYGVPVFSVVVVGTAYMWWKGWKLSDLMFATRRGLADACSSVGKQLDQVSSSVKATRQFLSSRIDRVDVTLDECAELTAGTKDEVFQLRGDMKVFSVDVESVHRAVQTLETKIGRIEEKQDITTHGVRVLCDFVHTVEMGRTGASIQASPSSFSRPALMTTASRSNSLPPKVLSLESPSPSSTDEVPKVKLPLQSTVSASGLKEFEGLSGATMTVAKSEVPNDSSSADPKSNGTSSSSRFGWKLPSLNASFLSRTNSATLSFNNI

SEQ ID NO: 642 - DNA, 1080 bp, Solanum tuberosum
atggctctacctctcggcaagctcactatcctcgttggtgctggcattgttgggtcagtacttgctaaggaaggacgattgccagatgtctctgattttttctccggcgcatttaagattgccttgaggcaaattcgacaagataaatcaaccagttcaactccaaagccacgcaatgattccttgctgcagcaggttaatagcttacggcaggagctgcaactcttggcttcaaatagatctgttacaattgtgacatcaagtggatcaggttctagcagatatactataatcattgttgttgtggtgatggggtatggctatatttggtggaagggttggaagcttcctgaatttatgtttgcaaccaggcggagcttatctgatgcatgtggtagtgtgtccaaacagcttgagagtgtatacacatctatttctgccacaaagcgccatttagcttcacgaattgatcgcgtggatactaaaattgatgattgtgtggataatactgctgcaacgagagacgaggtttctgaaattcgaggaaaagtgagaacatttggtgaggatgtccagtcagttcatcttgttgtccaatcattggagacaaaaatttgtagaattgaagggagacagaatgaaacaaactatggtgtgggaaagttgctttcttttgcgaggagcattgaaactagtagacccaaggaacagattgaggcacctccatctagctcatctagacctgcccttgaattaccatcagtagcttcctcagcacgggctgggtctttgcctccaagtttatcagtcgaatcaccatctccatctgcttctagtgtatctccgaagcgtcctttgcatggtgctgtatctgcctcaggccttaaggagcttggaggtatatcagatgtagtccaagtgtcaagtgaaagcagccctcaggtttccaatgctgttttcacctcagaacagaggagcaatgagaactctggttttggtagcgtgtttgggcgtaattttgcaggcagtggtgcttcttttctcacaagaagccgcagtgctatgcagagttttaagtga

SEQ ID NO: 643 - protein, 359 aa, Solanum tuberosum
MALPLGKLTILVGAGIVGSVLAKEGRLPDVSDFFSGAFKIALRQIRQDKSTSSTPKPRNDSLLQQVNSLRQELQLLASNRSVTIVTSSGSGSSRYTIIIVVVVMGYGYIWWKGWKLPEFMFATRRSLSDACGSVSKQLESVYTSISATKRHLASRIDRVDTKIDDCVDNTAATRDEVSEIRGKVRTFGEDVQSVHLVVQSLETKICRIEGRQNETNYGVGKLLSFARSIETSRPKEQIEAPPSSSSRPALELPSVASSARAGSLPPSLSVESPSPSASSVSPKRPLHGAVSASGLKELGGISDVVQVSSESSPQVSNAVFTSEQRSNENSGFGSVFGRNFAGSGASFLTRSRSAMQSFK

SEQ ID NO: 644 - DNA, 1092 bp, Populus trichocarpa
atggctcttcctctcggcaagttaactattctcgtcggtgcaggtattcttggctcagttcttgcaaaagaggggcggctgcctgatgtttctaatttcgtttcaggtgctttcaagattgctttcaggcaacttaaacaggatgattctacttcatcagttagcaagtctagcaaacctccaaacgactctttgatggctcaggttaacagccttcgacaggagctgcaaatgttggcatcaagtagaccagtcacaattgtaactgcaaatgggacaggttctaataaatatggtgtagttattgtggtggtagttgttggatatggctatgtttggtggaagggttggaaacttcctgatatgatgtttgcaaccaggcgtagtttatctgatgcttgcacttctatagcccagcaactagagaatgtttatgcatcaatccggagtaccaggaggcatttatcttcaaagatcgatggcgtggactcaaatttgaatgctgttgcagaactgacagccagcactcaagaaaaggttattgaattgcgagaagattcaagtaggattggcaatgatgttcgatatgttcgtgatgccgttgaaactctggaactaaaaattagcagaattgaagggaaacaggatttgacgacccaaggagtaaagaggttgtgtgactatgcctccagtttggaaaacaacttacttgaagagaatatccaggcatacttcagcatccagttcacggctgacattctcatcaaagttttcactagtttttgtgttgttatttaccaggctggggcattgcctgctccatcaagtgaaccatcaactcctgcttcgattggatctcaagaggttcaaaggccccctcgtaatgctgcatcaccctcaagccagcagagaagtaacgggatttcaggagtggctgagcttgctagcggcctcgggatttctaaaggtatccttacagaagaagaaacaagtaatggaacgagctggtttaaacctgcatttcttatgagaacgcgaagcgcaacaaacagtgtagtgcaacaaacaagttcaagcagacagcaatcgtga

SEQ ID NO: 645 - protein, 363 aa, Populus trichocarpa
MALPLGKLTILVGAGILGSVLAKEGRLPDVSNFVSGAFKIAFRQLKQDDSTSSVSKSSKPPNDSLMAQVNSLRQELQMLASSRPVTIVTANGTGSNKYGVVIVVVVVGYGYVWWKGWKLPDMMFATRRSLSDACTSIAQQLENVYASIRSTRRHLSSKIDGVDSNLNAVAELTASTQEKVIELREDSSRIGNDVRYVRDAVETLELKISRIEGKQDLTTQGVKRLCDYASSLENNLLEENIQAYFSIQFTADILIKVFTSFCVVIYQAGALPAPSSEPSTPASIGSQEVQRPPRNAASPSSQQRSNGISGVAELASGLGISKGILTEEETSNGTSWFKPAFLMRTRSATNSVVQQTSSSRQQS

SEQ ID NO: 646 - DNA, 1095 bp, Triphysaria sp.
atggcgcttcctctaggcaagctcaccatcatcgtcggtgccggccttgtgggatcggttcttgctaaagaaggcaggatatctgatgtttctgattttttctctggtgcatttaagattgttttcaagcagcttagacaagatggttctactgctccgagttccaaaccaaaaaatgactccttgatgcaacaggttagtagccttcgtgaggaattgcagctcttggcatctcatagatctgttacgattgtcactgggggcagatcaggatctaacaagtatggtgtggctgttattgttgtagttgttggatatggctatgtttggtggaagggttggaagctttcagaaatgatgtttgcgacgaggcgtggcttaaacgatgcatgttcttctgtagctaaacagcttgagactgtttactcctcaatttcggccaccaggaggcatttgtcctcgaggattgacagtgtagactgtaaaattgatgagtgtgctgataatacatctgcaacaaaagaggaggtctctgaacttcgaggtgatgagagactgataggtacagatgtccaatctgttcaccatgttgtgcgatctctggaaactaagattagcaggatagaaggaaggcagaatgaaatgaactttggagtgggtaagttggttcatttcgtgaagaatcttgagaacggaagtttggagcagattgagggggctgcatcgagttcatccactcctgctcttgaattgccacaagtatctccatcaaggactgtctctctgccgaccaacgctttacctgagtcaccttcaccctctaatgctgttggatctcgaagcagacaggctttgtgtccgccttccaattcttcacagaatatatcttctgcatcaggcctcaaggagcttcatggaatagctaatgatatcggatcaccaagcctaagtcgcactccagttgctaacgcaactcatgcaaccgaagaaacaaagcctgagagttcgtctacgggtttatttgggaggacattatccggcatcagtgcatctttgcttacaagaagccgcagtgcgatgcagtcattcaagtag

SEQ ID NO: 647 - protein, 364 aa, Triphysaria sp.
MALPLGKLTIIVGAGLVGSVLAKEGRISDVSDFFSGAFKIVFKQLRQDGSTAPSSKPKNDSLMQQVSSLREELQLLASHRSVTIVTGGRSGSNKYGVAVIVVVVGYGYVWWKGWKLSEMMFATRRGLNDACSSVAKQLETVYSSISATRRHLSSRIDSVDCKIDECADNTSATKEEVSELRGDERLIGTDVQSVHHVVRSLETKISRIEGRQNEMNFGVGKLVHFVKNLENGSLEQIEGAASSSSTPALELPQVSPSRTVSLPTNALPESPSPSNAVGSRSRQALCPPSNSSQNISSASGLKELHGIANDIGSPSLSRTPVANATHATEETKPESSSTGLFGRTLSGISASLLTRSRSAMQSFK

SEQ ID NO: 648 - protein, 43 aa, Artificial sequence
  motif 31
  VARIANT (2)..(2): / replace = "Leu"
  VARIANT (3)..(3): / replace = "Lys"
  VARIANT (4)..(4): / replace = "Leu"
  VARIANT (7)..(7): / replace = "Val"
  VARIANT (9)..(9): / replace = "Phe"
  VARIANT (10)..(10): / replace = "Ala"
  VARIANT (12)..(12): / replace = "Arg"
  VARIANT (14)..(14): / replace = "Ser"
  VARIANT (15)..(15): / replace = "Leu"
  VARIANT (16)..(16): / replace = "Ser"
  VARIANT (17)..(17): / replace = "Asp"
  VARIANT (20)..(20): / replace = "Ala"
  VARIANT (21)..(21): / replace = "Asn"
  VARIANT (22)..(22): / replace = "Leu"
  VARIANT (23)..(23): / replace = "Ser"
  VARIANT (25)..(25): / replace = "His"
  VARIANT (27)..(27): / replace = "His"
  VARIANT (28)..(28): / replace = "Asn"
  VARIANT (31)..(31): / replace = "Ser" / replace = "Asp"
  VARIANT (32)..(32): / replace = "Ser"
  VARIANT (36)..(36): / replace = "Ala"
  VARIANT (38)..(38): / replace = "Lys"
  VARIANT (41)..(41): / replace = "Ser"
GWSFSDLMYVTKRNMANAVSSVTKQLEQVSEALAATKRHLTQR

SEQ ID NO: 649 - protein, 15 aa, Artificial sequence
  motif 32
  VARIANT (3)..(3): / replace = "Thr"
  VARIANT (4)..(4): / replace = "Leu"
  VARIANT (6)..(6): / replace = "Val"
  VARIANT (7)..(7): / replace = "Leu" / replace = "Met"
  VARIANT (10)..(10): / replace = "Cys
AAAVGAVGYGYMWWK

SEQ ID NO: 650 - protein, 15 aa, Artificial sequence
  motif 33
  VARIANT (4)..(4): / replace = "Tyr"
  VARIANT (7)..(7): / replace = "Thr"
  VARIANT (8)..(8): / replace = "Val"
  VARIANT (9)..(9): / replace = "Val"
  VARIANT (10)..(10): / replace = "Ala"
  VARIANT (11)..(11): / replace = "Arg"
  VARIANT (12)..(12): / replace = "Glu"
  VARIANT (14)..(14): / replace = "Arg"
GAGLTGSILLKNGKL

SEQ ID NO: 651 - protein, 43 aa, Artificial sequence
  motif 34
  VARIANT (2)..(2): / replace = "Ile"
  VARIANT (3)..(3): / replace = "Lys"
  VARIANT (5)..(5): / replace = "Ala"
  VARIANT (14)..(14): / replace = "Ser"
  VARIANT (17)..(17): / replace = "Tyr"
  VARIANT (20)..(20): / replace = "Ala"
  VARIANT (21)..(21): / replace = "Ser"
  VARIANT (22)..(22): / replace = "Met"
  VARIANT (25)..(25): / replace = "Asn"
  VARIANT (27)..(27): / replace = "Asp"
  VARIANT (30)..(30): / replace = "Gln"
  VARIANT (31)..(31): / replace = "Asp"
  VARIANT (32)..(32): / replace = "Ser"
  VARIANT (34)..(34): / replace = "Ser"
  VARIANT (36)..(36): / replace = "Thr"
  VARIANT (38)..(38): / replace = "Arg"
GLSFSDLMYVTKRNMANAVSNLTKHLEQVSEALAAAKKHLTQR

SEQ ID NO: 652 - protein, 29 aa, Artificial sequence
  motif 35
  VARIANT (1)..(1): / replace = "Gly"
  VARIANT (2)..(2): / replace = "Ser"
  VARIANT (3)..(3): / replace = "Ser"
  VARIANT (4)..(4): / replace = "Gln"
  VARIANT (5)..(5): / replace = "Gln"
  VARIANT (7)..(7): / replace = "Gly"
  VARIANT (9)..(9): / replace = "Ser"
  VARIANT (10)..(10): / replace = "Gly"
  VARIANT (12)..(12): / replace = "Val"
  VARIANT (13)..(13): / replace = "Met"
  VARIANT (17)..(17): / replace = "Ala"
  VARIANT (18)..(18): / replace = "Val"
  VARIANT (21)..(21): / replace = "Val"
NGGSGGNLTSLIVPAATLGALGYGYMWWK

SEQ ID NO: 653 - protein, 29 aa, Artificial sequence
  motif 36
  VARIANT (1)..(1): / replace = "Ala"
  VARIANT (5)..(5): / replace = "Ser"
  VARIANT (7)..(7): / replace = "Ile" / replace = "Val"
  VARIANT (9)..(9): / replace = "Phe" / replace = "Val"
  VARIANT (10)..(10): / replace = "Thr"
  VARIANT (11)..(11): / replace = "Arg"
  VARIANT (12)..(12): / replace = "Val"
  VARIANT (13)..(13): / replace = "Val"
  VARIANT (16)..(16): / replace = "Val"
  VARIANT (24)..(24): / replace = "Val"
  VARIANT (25)..(25): / replace = "Met" / replace = "Val"
MAMQAGMGLSKILILAGAGYTGTILLKNG

SEQ ID NO: 654 - protein, 50 aa, Artificial sequence
  motif 37
  VARIANT (3)..(3): / replace = "Met"
  VARIANT (11)..(11): / replace = "Val"
  VARIANT (22)..(22): / replace = "Ser"
  VARIANT (33)..(33): / replace = "Ser"
  VARIANT (36)..(36): / replace = "Ser"
  VARIANT (39)..(39): / replace = "Ala" / replace = "Glu"
  VARIANT (44)..(44): / replace = "Asn"
  VARIANT (46)..(46): / replace = "Asp"
  VARIANT (47)..(47): / replace = "Ser"
LIVPAATLGALGYGYMWWKGLKFSDLMYVTKRNMATAVSNLTKHLEQVSE

SEQ ID NO: 655 - protein, 50 aa, Artificial sequence
  motif 38
  VARIANT (5)..(5): / replace = "Ser"
  VARIANT (7)..(7): / replace = "Val"
  VARIANT (8)..(8): / replace = "Ser"
  VARIANT (9)..(9): / replace = "Val" / replace = "Phe"
  VARIANT (11)..(11): / replace = "Arg"
  VARIANT (22)..(22): / replace = "Ser"
  VARIANT (25)..(25): / replace = "Met"
  VARIANT (33)..(33): / replace = "Glu"
  VARIANT (34)..(34): / replace = "Ile"
  VARIANT (35)..(35): / replace = "Ile"
  VARIANT (42)..(42): / replace = "Leu"
  VARIANT (43)..(43): / replace = "Asn"
  VARIANT (45)..(45): / replace = "Leu"
  VARIANT (46)..(46): / replace = "Gly"
  VARIANT (47)..(47): / replace = "Glu"
  VARIANT (50)..(50): / replace = "Asp"
MAMQAGIGLSKILILAGAGYTGTILLKNGKLSDLLGELQSLVKGMEKSGE

SEQ ID NO: 656 - protein, 41 aa, Artificial sequence
  motif 39
  VARIANT (2)..(2): / replace = "Ile"
  VARIANT (3)..(3): / replace = "Ser"
  VARIANT (4)..(4): / replace = "Thr"
  VARIANT (7)..(7): / replace = "Thr"
  VARIANT (15)..(15): / replace = "His"
  VARIANT (16)..(16): / replace = "Val"
  VARIANT (20)..(20): / replace = "Val"
  VARIANT (22)..(22): / replace = "Glu" / replace = "Ser"
  VARIANT (24)..(24): / replace = "Asn"
  VARIANT (25)..(25): / replace = "Asp"
  VARIANT (26)..(26): / replace = "Leu"
  VARIANT (29)..(29): / replace = "Ala"
  VARIANT (31)..(31): / replace = "Lys"
  VARIANT (32)..(32): / replace = "Glu"
  VARIANT (33)..(33): / replace = "Asn"
  VARIANT (37)..(37): / replace = "Val"
  VARIANT (38)..(38): / replace = "Ser"
  VARIANT (40)..(40): / replace = "Asp"
ALAAAKKHLTQRIQNLDDKMEKQKEISKSIQNDVNAAQENL

SEQ ID NO: 657 - DNA, 54 bp, Artificial sequence
  primer 1
ggggacaagtttgtacaaaaaagcaggcttaaacaatggctatgcaagcaggag

SEQ ID NO: 658 - DNA, 50 bp, Artificial sequence
  primer 2
ggggaccactttgtacaagaaagctgggtgctaggtgtcgtgtcaaggat

SEQ ID NO: 659 - DNA, 2194 bp, Oryza sativa; identical to SEQ ID NO: 289

SEQ ID NO: 660 - DNA, 4440 bp, Arabidopsis thaliana
atgggagtacaaggtctttgggagcttcttgctcctgttggtcgccgtgtctccgtagaaaccctagccaacaaacgattagccatcgatgcgagtatatggatggtacaatttatcaaagcgatgcgtgacgagaagggagatatggttcagaatgcacacttgatcgggttttttcgaaggatttgtaagcttttgtttctaaggactaaaccgatcttcgtctttgatggagctactccggcattgaaacgtcgtactgttattgctcgccgtcgtcaacgtgagaacgctcagactaaaatccggaagactgctgagaaattgctgcttaataggcttaaggatattaggcttaaggaacaagctaaagatattaagaatcagagattgaagcaggatgatagtgatagagtgaagaaacgtgtgtcttctgattctgtggaagataatttgcgagttcctgtggaggaagatgatgtaggggcgagtttttttcaggaggagaagctagatgaagtatctcaagcatctttggtgggagagactggtgttgatgatgttgtcaaagagtccgtgaaggatgatcccaagggaaagggagttttgttggatggggatgacctagataatcttgtacaggattcctcagtacaggggaaggattatcaggaaaagttggatgagatgttggcggcatcccttgcagctgaagaagaacgaaactttactagcaaagcatcgacttcagctgcagcaatcccgtcagaggaggatgaggaagaagacagcgacggagatgaggaaattttattgccagtaatggatgggaatatcgacccagctgttctggcttctctccctccatccatgcaacttgatctccttgctcagatgagagaaaaattgatggcagaaaaccggcaaaagtaccaaaaggtcaagaaggcccctgaaaagttttctgaattgcaaatagaagcatatcttaaaactgtagccttccgtcgcgaaataaatgaagttcagagatctgctggtggaagggctgttggtggagttcaaacttctaggatagcttcggaagcaaacagagagtttatattctcgtcttcttttgctggtgataaagaagtactggcatctgccagagaaggaagaaatgatgaaaatcaaaagaaaacgtcacaacagtctttgccagtctccgtcaagaatgcttccccgctgaaaaaatcagatgctaccattgagttggatagagatgaacctaaaaatcctgatgaaaatattgaagtatatatagatgaaaggggacgttttagaataaggaacagacacatgggaatccaaatgacacgtgatatccagaggaacttacatttgatgaaagaaaaggagagaacagcttctggttctatggctaagaatgatgaaacattcagcgcctgggagaactttcctactgaggaccaatttcttgaaaaatcacctgttgagaaagatgttgtggacctggagatccagaatgatgattccatgctgcatcctccatcttccatagagatatcatttgaccatgatggtggtggaaaagatctcaatgatgaagatgatatgtttcttcaattggcagcgggaggaccagtgacaattagttctacagaaaatgatcctaaagaagacacttcaccgtgggcttctgacagtgattgggaagaagtgcctgttgaacagaatacttctgtctctaagcttgaagcgaatttaagcaatcagcatatccccaaggacattagtatcgctgagggtgtagcatgggaagaatatagttgtaaaaatgccaataactccgtggagaatgatacagtaacaaagatcacaaaaggatatctggaagaagaagctgatctgcaggaggctatcaagaaaagtcttcttgaattacacgataaggaatccggggatgtccttgaagaaaatcaatcagtaagggtaaatcttgttgttgacaagccaagcgaagatagtctttgttctagggaaacggttggtgaagctgaggaagagagatttctggacgaaataacaatcttgaaaaccagtggtgctataagtgagcagtccaacacttctgtagcgggcaatgcagatggtcagaaagggataaccaaacaatttggtacacacccttcttccggttctaataacgttagccatgctgtgagcaataaattgtcaaaggtaaaatcagttatctcacccgagaaagcattaaatgttgctagtcaaaaccgcatgctatccaccatggctaaacagcacaatgaagaaggttctgaaagttttggtggagaatctgttaaagtgtctgctatgcccatagctgatgaggaaataactggttttcttgatgaaaaagataatgctgatggtgaatcatctatcatgatggacgataagagagattatagtagacgtaaaatccagagtcttgtcactgaatcaagggacccttctcgtaatgtcgtcagatcgcgaatagggatactacatgacacagattcacaaaatgaaagaagggaggaaaataactctaacgagcacactttcaatattgacagttcaacagattttgaagagaaaggcgtgcctgttgaattttcagaggcaaatatagaggaggaaattcgagttctcgaccaagaattcgtaagtttaggtgatgaacagagaaaacttgagcggaatgctgaatctgtgagcagtgagatgtttgcagaatgccaggagctactccaaatttttggcataccgtacatcatagctcccatggaagcagaggcacagtgtgcatttatggaacaatcaaaccttgttgatggcattgtcactgacgattctgatgtattcttgtttggagcaaggagcgtgtacaaaaatatatttgatgatcgtaaatatgtggagacatactttatgaaggacattgagaaggagttaggcttgagcagagataaaataatccgcatggcaatgcttctaggaagtgattacacagaaggaatcagtggtattggtattgtcaatgctattgaagttgtgactgcttttcccgaggaggatgggcttcagaaatttcgtgaatgggttgaatcacctgatccaaccattttaggaaagactgatgcaaaaacaggttcaaaggtaaagaagcgtgggtctgcctccgtagataataaaggaatcatctcaggtgcctcgactgatgacaccgaagaaatcaagcaaatcttcatggatcagcatagaaaggtaagcaagaactggcatattccattgactttccctagtgaggctgttatatcagcctacttaaatccgcaagtggatctgtcgactgagaaattctcatggggcaaacctgatctttcagtacttagaaagctatgctgggaaaagtttaattggaacggcaagaaaacagatgaactactactaccagtcttgaaggagtatgaaaagcgcgagacgcaacttcggattgaagctttctattcctttaatgaaagatttgcaaagatccgtagtaaaagaatcaacaaagctgtcaaaggaattggtggaggtctgtcgtcagatgtggccgatcatactctccaggaaggtccaagaaaacgaaataagaaaaaagttgctcctcatgaaactgaagataacaacacttcagacaaagattcacctatagccaatgagaaagtgaaaaacaaaaggaagcgcttagaaaaaccatctagtagtagaggtagaggcagagcccagaaaagaggacgaggaagaggaagagtccaaaaagatctccttgagctatccgacggcagttctgatgatgatgatgacgatgacaaggtagtggaattggaggcaaaaccggccaatcttcaaaaatcaacacgatctcggaatcctgtgatgtacagtgcaaaagaagatgatgaattggacgagtcaagaagcaatgaaggatctccgagtgagaatttcgaagaggttgacgaaggcagaataggaaatgatgattctgtagatgcatcaatcaacgactgtccttccgaagactacattcaaacgggaggtgggttctgtgcagatgaagctgatgagattggagatgctcatttggaagataaagctaccgatgattacagagtgatcggtggcggattctgtgttgatgaagatgaaacagctgaggaaaacacaatggatgatgatgcagaaattttaaagatggagagtgaagaacaacgaaagaaaggtaaacgtcgaaacgaagaagatgcatcattggatgagaatgttgacattcattttgggaattcttcagctggaggattaagtgcgatgcctttcttgaagagaaagaagagaaaaaactga

SEQ ID NO: 661 - protein, 1479 aa, Arabidopsis thaliana
MGVQGLWELLAPVGRRVSVETLANKRLAIDASIWMVQFIKAMRDEKGDMVQNAHLIGFFRRICKLLFLRTKPIFVFDGATPALKRRTVIARRRQRENAQTKIRKTAEKLLLNRLKDIRLKEQAKDIKNQRLKQDDSDRVKKRVSSDSVEDNLRVPVEEDDVGASFFQEEKLDEVSQASLVGETGVDDVVKESVKDDPKGKGVLLDGDDLDNLVQDSSVQGKDYQEKLDEMLAASLAAEEERNFTSKASTSAAAIPSEEDEEEDSDGDEEILLPVMDGNIDPAVLASLPPSMQLDLLAQMREKLMAENRQKYQKVKKAPEKFSELQIEAYLKTVAFRREINEVQRSAGGRAVGGVQTSRIASEANREFIFSSSFAGDKEVLASAREGRNDENQKKTSQQSLPVSVKNASPLKKSDATIELDRDEPKNPDENIEVYIDERGRFRIRNRHMGIQMTRDIQRNLHLMKEKERTASGSMAKNDETFSAWENFPTEDQFLEKSPVEKDVVDLEIQNDDSMLHPPSSIEISFDHDGGGKDLNDEDDMFLQLAAGGPVTISSTENDPKEDTSPWASDSDWEEVPVEQNTSVSKLEANLSNQHIPKDISIAEGVAWEEYSCKNANNSVENDTVTKITKGYLEEEADLQEAIKKSLLELHDKESGDVLEENQSVRVNLVVDKPSEDSLCSRETVGEAEEERFLDEITILKTSGAISEQSNTSVAGNADGQKGITKQFGTHPSSGSNNVSHAVSNKLSKVKSVISPEKALNVASQNRMLSTMAKQHNEEGSESFGGESVKVSAMPIADEEITGFLDEKDNADGESSIMMDDKRDYSRRKIQSLVTESRDPSRNVVRSRIGILHDTDSQNERREENNSNEHTFNIDSSTDFEEKGVPVEFSEANIEEEIRVLDQEFVSLGDEQRKLERNAESVSSEMFAECQELLQIFGIPYIIAPMEAEAQCAFMEQSNLVDGIVTDDSDVFLFGARSVYKNIFDDRKYVETYFMKDIEKELGLSRDKIIRMAMLLGSDYTEGISGIGIVNAIEVVTAFPEEDGLQKFREWVESPDPTILGKTDAKTGSKVKKRGSASVDNKGIISGASTDDTEEIKQIFMDQHRKVSKNWHIPLTFPSEAVISAYLNPQVDLSTEKFSWGKPDLSVLRKLCWEKFNWNGKKTDELLLPVLKEYEKRETQLRIEAFYSFNERFAKIRSKRINKAVKGIGGGLSSDVADHTLQEGPRKRNKKKVAPHETEDNNTSDKDSPIANEKVKNKRKRLEKPSSSRGRGRAQKRGRGRGRVQKDLLELSDGSSDDDDDDDKVVELEAKPANLQKSTRSRNPVMYSAKEDDELDESRSNEGSPSENFEEVDEGRIGNDDSVDASINDCPSEDYIQTGGGFCADEADEIGDAHLEDKATDDYRVIGGGFCVDEDETAEENTMDDDAEILKMESEEQRKKGKRRNEEDASLDENVDIHFGNSSAGGLSAMPFLKRKKRKN

SEQ ID NO: 662 - DNA, 3711 bp, Drosophila melanogaster
atgggagttacgggcttgtggaagctcattgagccgtgcggcaagccagtccccgtagagactttggagggcaaaatcctagcagtggatatatcgatttggttgcatcaggttgtgaagggctttcaggacaacaagggatcggccctgagtaatgcccatttactgggtctattccatcgtctctgtaaattgctatactatcgtgtgcgaccggttttcattttcgatggatgcgtgccgcagcttaaaagggacactattgcacgtcgccagcagcagaggaataagctcagcaacgaagctgatcgcattcaggctttgctccttcaatccctggccaaagaaaaagtagtgcagcaagcgctgggcaagaatgcagagctactgttgaaatccccggttaagcgaccgcctccagctaagaagaacgacgaggatgacttgtttaagcttcccgaactgccggctgcatcggtgcaagataatcaagatgaaagcgagcaggacaccagtgccagtgcctcagacagctcctttgacgagtcaaccgctcgacattcttacaactctagcttacaggccatcgatgtaaagagtcagcattttcggaatctgccagccgatgtgcgacacgagatccttacagacatcaaggagacgcgcaagcaatcgtcgtggggccgtctgcacgagttgcccgcccgcagcgatgacttctgctccttccagatgaagagactcctcaagcgccgagccgttcaggaaagcttagagcaggcggaacaggagatgggcggacatacgcttacctatgcagagttgtgtgactttttcaatgaggagggcattctcaccccaacggccattgaacagtgcacccgacaaattagctcggatgaacatacacgattcctgctggtcagggatcttaaaaagaaagcaatggagagcaccaaacaagaggttaaaatggagatgattgaggaggtacccgctgaggaggaggatgagaagccaagcacttccaccaagaaagaggctgtgaaaagtgtggacctaggcacagagttcgatgaagatttggccaaagcactgtctatgtcaatggaggagaccaaggtgtacgatgaaaaggactacgagtacgactcggaccaagagttgcgcctcaatcgagctcaaaccaagcaattgcgccatgcggccaagggacctgcacgggcctatatgattgaatacggcggaatgaacgacgaggaagttggcaacatcatggaggccactcagttcaatgacactcaaagccttgaaaagttgctagagatcacgacagtcccgaccgacatggctgacaactcgattgaggaggccaaacttatttcacaagctattgaagagagcaaacaactatcccaagcaattgaggaaagcaagaagaatcttaacgaggacaaggtggagattgtagatactgataccgactcagacttggaggaagtaatggaagttcaggagctggataaaggcaagaagaatcttgagatttgtgttgatattactggccaagcggattcgaatgatctgtttgcggatatttttgaggatggagaggcaaataaaatagagaaaactataagcgtcgaggaagacgatgactttatagaagtgaaagacagtgaggaattaaaattggatactgaagatgaaaataaaccaataacgaataagagtattaaagaaagtaatgaagtcaagccgttcattgatgaaattatcgaagtgaaagatagccaagaagcggttcctgcagaacctaatctcaaacccgatctggaatcaattttaaatgatctgaaaaaacaaacggctgcggttaaagatattcagctaaacgtaaatgaagaagaaaaaccaaaaccaaaggtggaaatcagttctatattggatgagctaaaagtaaagatggccgacgttaaaaacatcactctagataacgtgaaattaagcaatagtgtccctatcatactatcctccgatgacgaaagtaccttgaaatcctcgaaaatagttccgaagcaagagctaattgagttgtgcgacagcgacgataataaaaacaatcgcctatcaccgaacaaaacgccaagcaaaaacaagtccattaaggacttttttgagaccagttacgtggtcaagcgaactcccgacaaatctcaagcgtcaaacgaaacttcgccgggaacaccaaagaccccgaagcccttcttcagaaagagaaccccgaagtccggacggaaacgagctagtgatgccaatgaggacagtgatgaggaagtttcgcccactaaaaggtccagtaaggcctcgaagtctctcttcgagccaaaggagccggaagaagaaaagactgtagatccggaggagattatcaaagatgctgcagaggctcttaaatctcaaaagacctcagaagaactgcaggagttggctacaaacttagctcaggagcgaaaggaacttgaaatcgagcggaatcggcaagaccgaatgggcatgtccatcagccagcgcatgagcatcgattgccaggagctgctgcgtcttttcggcattccgtacattgtggctcccatggaggcagaggcgcagtgcgcctttctcaatgccacagatcttacccacggcaccatcacggatgatagtgatatctggctttttggtggtcgaactgtctacaagaacttctttgcacaaaacaagcacgtgatggaattccgggcggaacagatcgagcaaacgtttaactgcaacaggggtaaactgatccagttggcctgtttggtgggcagtgactacactacaggaattcatggcattggtgctgtaacggccctggagattttggcctccttttccggacaggatgcgaatgggccaggtatctgcaatcaatcggtgcttcaaacgctaatcaagttccgcgactggtggcaagcacacaagtgcagcaatcttccacctggcagctcggctcgccttgctctgcgcaaaaaacttaagaacatcgaactgcacgagggttttcccagcggtgcagtggtggaggcatatttagcgcccacgatcgacgacaatcgggatgcatttagttggggcacaccggatgtggaatcaatcagagaattcacgcgaaaatctttcggctggactacttcaaaaacggacgacattctgatgcccgtgatgaaaaaaattaacgagaagaagatacagggttccatacgcaactactttacggcaaagagtgctctgcgagttcaacaaccgcacgtcagcaaacgtgtccaattggcaattgacaagatgtccggaaagatcgatgagacgccggagaaaccgaagaaggtgacacgcacaagacgtgcaaaggcagctccgccaacagatgatgatttggccatcgcggatgtcgcgacaaaagctgcccgtcccaaacgcggcaaacgaaaagctgcacctgaatcggtagttttggatggggaacttccttccacatcgcagtcgataccgaagcctgaaaaatgtcctcgaatacctagcagcgttgaagttatacctcaaagggaaaaggatctggagcagatgcgcctcaataaagcaaaggcggcagagattcttaaaaattcagcgaaagccaataggaaataa

SEQ ID NO: 663 - protein, 1236 aa, Drosophila melanogaster
MGVTGLWKLIEPCGKPVPVETLEGKILAVDISIWLHQVVKGFQDNKGSALSNAHLLGLFHRLCKLLYYRVRPVFIFDGCVPQLKRDTIARRQQQRNKLSNEADRIQALLLQSLAKEKVVQQALGKNAELLLKSPVKRPPPAKKNDEDDLFKLPELPAASVQDNQDESEQDTSASASDSSFDESTARHSYNSSLQAIDVKSQHFRNLPADVRHEILTDIKETRKQSSWGRLHELPARSDDFCSFQMKRLLKRRAVQESLEQAEQEMGGHTLTYAELCDFFNEEGILTPTAIEQCTRQISSDEHTRFLLVRDLKKKAMESTKQEVKMEMIEEVPAEEEDEKPSTSTKKEAVKSVDLGTEFDEDLAKALSMSMEETKVYDEKDYEYDSDQELRLNRAQTKQLRHAAKGPARAYMIEYGGMNDEEVGNIMEATQFNDTQSLEKLLEITTVPTDMADNSIEEAKLISQAIEESKQLSQAIEESKKNLNEDKVEIVDTDTDSDLEEVMEVQELDKGKKNLEICVDITGQADSNDLFADIFEDGEANKIEKTISVEEDDDFIEVKDSEELKLDTEDENKPITNKSIKESNEVKPFIDEIIEVKDSQEAVPAEPNLKPDLESILNDLKKQTAAVKDIQLNVNEEEKPKPKVEISSILDELKVKMADVKNITLDNVKLSNSVPIILSSDDESTLKSSKIVPKQELIELCDSDDNKNNRLSPNKTPSKNKSIKDFFETSYVVKRTPDKSQASNETSPGTPKTPKPFFRKRTPKSGRKRASDANEDSDEEVSPTKRSSKASKSLFEPKEPEEEKTVDPEEIIKDAAEALKSQKTSEELQELATNLAQERKELEIERNRQDRMGMSISQRMSIDCQELLRLFGIPYIVAPMEAEAQCAFLNATDLTHGTITDDSDIWLFGGRTVYKNFFAQNKHVMEFRAEQIEQTFNCNRGKLIQLACLVGSDYTTGIHGIGAVTALEILASFSGQDANGPGICNQSVLQTLIKFRDWWQAHKCSNLPPGSSARLALRKKLKNIELHEGFPSGAVVEAYLAPTIDDNRDAFSWGTPDVESIREFTRKSFGWTTSKTDDILMPVMKKINEKKIQGSIRNYFTAKSALRVQQPHVSKRVQLAIDKMSGKIDETPEKPKKVTRTRRAKAAPPTDDDLAIADVATKAARPKRGKRKAAPESVVLDGELPSTSQSIPKPEKCPRIPSSVEVIPQREKDLEQMRLNKAKAAEILKNSAKANRK

SEQ ID NO: 664 - DNA, 3891 bp, Glycine max
atgggagtccacggtctctgggaactcctcgcccccgtcggtcgccgcgtctccgtcgaaacccttgccggaaaaaccctagccgttgatgcgagcatatggatggtacagtttgtcaaagcgatgcgcgacgagaagggcgaaatggttcgcaacgcccatttgctgggcttcttccgtcgcatttgcaaacttcttttcctccgcaccaagccggtcttcgtcttcgacggcgggacccctgccctcaagcgccgcactgtcattgcacgccgccgccagcgtgaaaacgcccaagccaaagtccgcaaaaccgccgagaaattgctgctcaatcatttaaaggcattaaggttgaaggaactggctgatgatcttaagaaccaaaggatgaagaagaatagtgatactaagggtcagaaaaaatctaatcagaaggactttgttggaagtgatttaggaggaagtcatgtgaaagagctagatgaaattcattgtgggggaatgagacaatatttcatttttgtttgttgttgtaacatccttattttctttgttaatgctagtaaatttattgatatttcaattattgttgcttcatctaaattttttttctcccctcagccatcagtaaatgcagaagttgatatggctgtattagctgccttaccacaatcaatgcaacttgatattcttgcacagcttaaaggaaagaaaaccgaaggactagtaaaggaagttgacaatcagaatcaacatgatgtcaattatcggggcaagggtaaggggattctgctcattgaagctgacatggtaggttgtagctccagacatgacaatgttacatcaaggagtgacaatcaacactcaattgatgaaatgttagctgcatctattgctatggaggaaaatgaagagttagtaaataatacatcaacttctgttggggcttccgctattgaggaagaggaagttgactatgatgaagatgaagaaatgatactgccagctatgcatggtaaaattgatcctgctgttctagcctcattgcctccatcaatgcaactggaccttcttgttcagatgagagagcgtttgattgcagagaacagacaaaagtatcagaaagtcaaaaaggatccagcaaaattctctgagctacagatacaagcttaccttaaaactgtcgctttcagacgggacatagatgaagtgcagaaagctgcagctgtaggaggagtaggtggtgtacagacttcacggattgcatctgaagccaacagagaatatattttctcgtcttcttttactggtgataaacacttagagaaaaataaagatacacaacagaaggtccagggagtacatccttcacagaaccttacagatagcattgtggcaggaaatgattctaatacttcaagcggattggttcacaatgaacctggtgagcctgctgatgaaagtattcagacatatcttgatgagaggggtcggtttcgagttagtagattgagagctatggggatgcgtatgacctgtgatatacaacggaatttggatttgttgaaggagattgagcaggaaagagcatatgtgaacaaggctgcgaatattggaacagtggaaaatgctgagaataatggtccatatgaaagttctgggatccagcttgttggtaaatcacaagagatgaatgttgacttagttggacagaatatgcaaaatgaacaaacaatgcttgacagagatacattgatagagatatcttttgaatatgattgcaagaataagttcgcaaatgatgaggatgatatattttctagtttagtaggaggaaatccagtggcaatctttggtgctgatgatactgcagcaaccgaacaaccttctcattctgattcagattgtgattgggaagaaggaattctcgaaggtaagagtaatgcttatcctgaacatgacgtggtagaattgaagtcttctgttgcagatgatcataaaaataatgaaagagaagtagaatgggaggaaggagattgtgatggtgctaacagcaccttactgtcaggaaaattggcatctcaagggtggttggaggaggagtctgatttgcaagaggcaataaggagaagtcttgaaagtataggggatatgaaacttaaatgcatgccagctgtagatgagcattcaaatacttatgagaacaaattggattgtggtttagaacatggtgatgatctgtattattctgaccctgtggatttaaatgacaacgttgggtttctgaataataaaaatagggaagacagtactgaaaaaaatgaattacatgaaattgaagatggagataaaaagcatgattttgtttctggcaataatgaacaaactttccattttcatggaactgaggttagcttggaggaagaaatgcaaattcttggtcaagaatatatcaacctagaaaatgagcagaggaagctagagcggaatgcagaatctgtaaacagtgaattattcactgaatgtcaggaactactgcaaatgtttggcttgccatatattattgctccaatggaagcagaagctcaatgtgcttatttggaacttgagaaactagttgatggtgttgtgactgatgactctgatgtccttttatttggggcacgcagtgtttacaaaaatatatttgatgaccgcaaatatgtagagacatacttcatggaggatattgaaaaggagcttggattgaccagagaaaaattaatacgcatggctctacttcttgggagtgattatactgaaggtgtaagtgggattggcattgttaatgctattgaggttgtgaatgcattccctgaggaagatggcctcctgaaattccggcaatgggttgagtcaccggatcccaccatccttggaaggttggatgcaaatagtggttcaaattccagaaagaaaggttgcaatgttaaagagtctgcggtgatgcaaaacatctgccatgctcaggagcaaaatgagttgtcagattacatccaagaaataaaacaaactttcttcaataagcatagaaatgttagcaagaattggcacattccttcttcttttccaagtgatactgttatatctgcttactattctccccatgttgataaatccactgagccattcacatggggaaagccagatcatcttgttcttcgaaaattgtgctgggagaaatttgggtggactggccagaaagcagatgaattgatcctaccagtcttaaaggagtataacaagcgtgagactcaattgcggttggaagcattttacaattttaatgaaagatttgcaaaaattcgtagtaaaagaattaagaaagcggtaaaaggaatcactggtaagcagccttcagatttgatagatgattctgcagaagagttctccaagagtaggaagactgggagagaacctgaggatatcacattggagacttcaaggggaatagagggaaatcttgagggtagaaggaaatcaaaaataaaacagtcaaggaagaatgatactgttgctaaggaacagtcaaagaaaaagaaagtcaatgatgatccctcttcagcacctggtacatctgagattgagaatttacagccaagtctgcagatagaagaagagcaacatgatggtaaggcattgattcggaatagaagtggcagaggaagaggtagaattatgggaataaaaagaggaagggataacaaaggtctcagttttcaatcttgcgaaactgaagcctcatctggtagcagtgacattgatgatcatgggccaagagtgcatgtggatagagttccaaaagatgtgcgaagggtgaaccttcattccgatttttctgatttataa

SEQ ID NO: 665 - protein, 1296 aa, Glycine max
MGVHGLWELLAPVGRRVSVETLAGKTLAVDASIWMVQFVKAMRDEKGEMVRNAHLLGFFRRICKLLFLRTKPVFVFDGGTPALKRRTVIARRRQRENAQAKVRKTAEKLLLNHLKALRLKELADDLKNQRMKKNSDTKGQKKSNQKDFVGSDLGGSHVKELDEIHCGGMRQYFIFVCCCNILIFFVNASKFIDISIIVASSKFFFSPQPSVNAEVDMAVLAALPQSMQLDILAQLKGKKTEGLVKEVDNQNQHDVNYRGKGKGILLIEADMVGCSSRHDNVTSRSDNQHSIDEMLAASIAMEENEELVNNTSTSVGASAIEEEEVDYDEDEEMILPAMHGKIDPAVLASLPPSMQLDLLVQMRERLIAENRQKYQKVKKDPAKFSELQIQAYLKTVAFRRDIDEVQKAAAVGGVGGVQTSRIASEANREYIFSSSFTGDKHLEKNKDTQQKVQGVHPSQNLTDSIVAGNDSNTSSGLVHNEPGEPADESIQTYLDERGRFRVSRLRAMGMRMTCDIQRNLDLLKEIEQERAYVNKAANIGTVENAENNGPYESSGIQLVGKSQEMNVDLVGQNMQNEQTMLDRDTLIEISFEYDCKNKFANDEDDIFSSLVGGNPVAIFGADDTAATEQPSHSDSDCDWEEGILEGKSNAYPEHDVVELKSSVADDHKNNEREVEWEEGDCDGANSTLLSGKLASQGWLEEESDLQEAIRRSLESIGDMKLKCMPAVDEHSNTYENKLDCGLEHGDDLYYSDPVDLNDNVGFLNNKNREDSTEKNELHEIEDGDKKHDFVSGNNEQTFHFHGTEVSLEEEMQILGQEYINLENEQRKLERNAESVNSELFTECQELLQMFGLPYIIAPMEAEAQCAYLELEKLVDGVVTDDSDVLLFGARSVYKNIFDDRKYVETYFMEDIEKELGLTREKLIRMALLLGSDYTEGVSGIGIVNAIEVVNAFPEEDGLLKFRQWVESPDPTILGRLDANSGSNSRKKGCNVKESAVMQNICHAQEQNELSDYIQEIKQTFFNKHRNVSKNWHIPSSFPSDTVISAYYSPHVDKSTEPFTWGKPDHLVLRKLCWEKFGWTGQKADELILPVLKEYNKRETQLRLEAFYNFNERFAKIRSKRIKKAVKGITGKQPSDLIDDSAEEFSKSRKTGREPEDITLETSRGIEGNLEGRRKSKIKQSRKNDTVAKEQSKKKKVNDDPSSAPGTSEIENLQPSLQIEEEQHDGKALIRNRSGRGRGRIMGIKRGRDNKGLSFQSCETEASSGSSDIDDHGPRVHVDRVPKDVRRVNLHSDFSDL

SEQ ID NO: 666 - DNA, 3561 bp, Homo sapiens
atgggggtccaggggctctggaagctgctggagtgctccgggcggcaggtcagccccgaagcgctggaagggaagatcctggctgttgatattagcatttggttaaaccaagcacttaaaggagtccgggatcgccatgggaactcaatagaaaatcctcatcttctcactttgtttcatcggctctgcaaactcttattttttcgaattcgtcctatttttgtgtttgatggggatgctccactattgaagaaacagactttggtgaagagaaggcagagaaaggacttagcgtccagtgactccaggaaaacgacagagaagcttctgaaaacatttttgaaaagacaagccatcaaaactgccttcagaagcaaaagagatgaagcactacccagtcttacccaagttcgaagagaaaacgacctctatgttttgcctcctttacaagaggaagaaaaacacagttcagaagaggaagatgaaaaagaatggcaagaaagaatgaatcaaaaacaagcattacaggaagagttctttcataatcctcaagcgatagatattgagtctgaggacttcagcagcctgccccctgaagtaaagcatgaaatcttgactgatatgaaagagttcaccaagcgcagaagaacattatttgaagcaatgccagaggagtctgatgacttttcacagtaccaactcaaaggcttgcttaaaaagaactatctgaaccagcatatagaacatgtccaaaaggaaatgaatcagcaacattcaggacacatccgaaggcagtatgaagatgaagggggctttctgaaggaggtagagtcaaggagagtggtctctgaagacacttcacattacatcttgataaaaggtattcaagctaagacagttgcagaagtggattcagagtctcttccttcttccagcaaaatgcacggcatgtcttttgacgtgaagtcatctccatgtgaaaaactgaagacagagaaagagcctgatgctacccctccttctccaagaactttactagctatgcaagctgccctgctgggaagtagctcagaagaggagctggagagtgaaaatcgaaggcaggcccgtgggaggaacgcacctgctgctgtagacgaaggctccatatcaccccggactctttcagccattaagagagctcttgacgatgacgaagatgtaaaagtgtgtgctggggatgatgtgcagacgggagggccaggagcagaagaaatgcgtataaacagctccaccgagaacagtgatgaaggacttaaagtgagagatggaaaaggaataccgtttactgcaacacttgcgtcatctagtgtgaactctgcagaggagcacgtagccagcactaatgaggggagagagcccacagactcagttccaaaagaacaaatgtcacttgttcacgtggggactgaagcctttccgataagtgatgagtctatgattaaggacagaaaagatcggctgcctctggagagtgcagtggttagacatagtgacgcacctgggctcccgaatggaagggaactgacaccggcatctccaacttgtacaaattctgtgtcaaagaatgaaacacatgctgaagtgcttgagcagcagaacgaactttgcccatatgagagtaaattcgattcttctcttctttcaagtgatgatgaaacaaaatgtaaaccgaattctgcttctgaagtcattggccctgtcagtttgcaagaaacaagtagcatagtaagtgtcccttcagaggcagtagataatgtggaaaatgtggtgtcatttaatgctaaagagcatgagaattttctggaaaccatccaagaacagcagaccactgaatctgcaggccaggatttaatttccattccaaaggccgtggaaccaatggaaattgactcggaagaaagtgaatctgatggaagtttcattgaagtgcaaagtgtgattagtgatgaggaacttcaagcagaattccctgaaacttccaaacctccctcagaacaaggcgaagaggaactggtaggaactagggagggagaagcccctgctgagtccgagagcctcctgagggacaactctgagagggacgacgtggatggtgagccacaggaagctgagaaagatgcggaagattcgctccatgaatggcaagatattaatttggaggagttggaaactctggagagcaacctcttagcacagcagaattcactgaaagctcaaaaacagcagcaagaacggatcgctgctactgtcaccggacagatgttcctggaaagccaggaactcctgcgcctgttcggcattccctacatccaggctcccatggaagcagaggcgcagtgcgccatcctggacctgactgatcagacttccggaaccatcactgatgacagtgatatctggctgtttggagcgcggcatgtctatagaaacttttttaataaaaacaagtttgtagaatattatcaatatgtggactttcacaatcaattgggattggaccggaataagttaataaatttggcttatttgcttggaagtgattataccgaaggaataccaactgtgggttgtgtaaccgccatggaaattctcaatgaattccctgggcatggcctggaacctctcctaaaattctcagaatggtggcatgaagctcaaaaaaatccaaagataagacctaatcctcatgacaccaaagtgaaaaaaaaattacggacattgcaactcacccctggctttcctaacccagctgttgccgaggcctacctcaaacccgtggtggatgactcgaagggatcctttctgtgggggaaacctgatctcgacaaaattagagaattttgtcagcggtatttcggctggaacagaacgaagacagatgaatctctgtttcctgtattaaagcaactcgatgcccagcagacacagctccgaattgattccttctttagattagcacaacaggagaaagaagatgctaaacgtattaagagccagagactaaacagagctgtgacatgtatgctaaggaaagagaaagaagcagcagccagcgaaatagaagcagtttctgttgccatggagaaagaatttgagctacttgataaggcaaaacgaaaaacccagaagagaggcataacaaataccttagaagagtcatcaagcctgaaaagaaagaggctttcagattctaaacgaaagaatacatgcggtggatttttgggggagacctgcctctcagaatcatctgatggatcttcaagtgaagatgctgaaagttcatctttaatgaatgtacaaaggagaacagctgcgaaagagccaaaaaccagtgcttcagattcgcagaactcagtgaaggaagctcccgtgaagaatggaggtgcgaccaccagcagctctagtgatagtgatgacgatggagggaaagagaagatggtcctcgtgaccgccagatctgtgtttgggaagaaaagaaggaaactaagacgtgcgaggggaagaaaaaggaaaacctaa

SEQ ID NO: 667 - protein, 1186 aa, Homo sapiens
MGVQGLWKLLECSGRQVSPEALEGKILAVDISIWLNQALKGVRDRHGNSIENPHLLTLFHRLCKLLFFRIRPIFVFDGDAPLLKKQTLVKRRQRKDLASSDSRKTTEKLLKTFLKRQAIKTAFRSKRDEALPSLTQVRRENDLYVLPPLQEEEKHSSEEEDEKEWQERMNQKQALQEEFFHNPQAIDIESEDFSSLPPEVKHEILTDMKEFTKRRRTLFEAMPEESDDFSQYQLKGLLKKNYLNQHIEHVQKEMNQQHSGHIRRQYEDEGGFLKEVESRRVVSEDTSHYILIKGIQAKTVAEVDSESLPSSSKMHGMSFDVKSSPCEKLKTEKEPDATPPSPRTLLAMQAALLGSSSEEELESENRRQARGRNAPAAVDEGSISPRTLSAIKRALDDDEDVKVCAGDDVQTGGPGAEEMRINSSTENSDEGLKVRDGKGIPFTATLASSSVNSAEEHVASTNEGREPTDSVPKEQMSLVHVGTEAFPISDESMIKDRKDRLPLESAVVRHSDAPGLPNGRELTPASPTCTNSVSKNETHAEVLEQQNELCPYESKFDSSLLSSDDETKCKPNSASEVIGPVSLQETSSIVSVPSEAVDNVENVVSFNAKEHENFLETIQEQQTTESAGQDLISIPKAVEPMEIDSEESESDGSFIEVQSVISDEELQAEFPETSKPPSEQGEEELVGTREGEAPAESESLLRDNSERDDVDGEPQEAEKDAEDSLHEWQDINLEELETLESNLLAQQNSLKAQKQQQERIAATVTGQMFLESQELLRLFGIPYIQAPMEAEAQCAILDLTDQTSGTITDDSDIWLFGARHVYRNFFNKNKFVEYYQYVDFHNQLGLDRNKLINLAYLLGSDYTEGIPTVGCVTAMEILNEFPGHGLEPLLKFSEWWHEAQKNPKIRPNPHDTKVKKKLRTLQLTPGFPNPAVAEAYLKPVVDDSKGSFLWGKPDLDKIREFCQRYFGWNRTKTDESLFPVLKQLDAQQTQLRIDSFFRLAQQEKEDAKRIKSQRLNRAVTCMLRKEKEAAASEIEAVSVAMEKEFELLDKAKRKTQKRGITNTLEESSSLKRKRLSDSKRKNTCGGFLGETCLSESSDGSSSEDAESSSLMNVQRRTAAKEPKTSASDSQNSVKEAPVKNGGATTSSSSDSDDDGGKEKMVLVTARSVFGKKRRKLRRARGRKRKT

SEQ ID NO: 668 - DNA, 4413 bp, Oryza sativa
atgggagtgcacgggctgtgggagctgctggctcccgtggggcggcgcgtgtcggtggagaccctggcggggaagcggctggcggtggacgcgagcatctggatggtgcagttcatgcgggcgatgcgggacgacaagggcgacatgatccgcgacgcccacctcctcgggttcctccgccgaatctgcaagctcctcttcctccgcgcgcgcccggtcttcgtcttcgacggcgccaccccggccctcaagcggcgcaccctcgccgcccgccgccgccaccgcgacgccgcccaggccaaggtccggaagaccgccgagaagctcctgctctcccatctcaaggctaggaagcttgaagaattggcagctcaaatcaagagtgacagggctaagcatgacaataaaggcaagcaagttgagagcagtaaaatgggagaaattgagaaaattaatggagagcaaaagaaaaacaacgatggagaaaacagcggggggattgtagcaccaatcgaccaggagaaactggatgaactgctggccgcatcacttgctgcagaggaagaggcaaatttgactggcaaaggaaaacagtatactgtaagtgttccattgcaagaagcagctgacattagtgaggatgatgacgaggatgatggagagatgatctttcctatgacaacaggtgatattgatcctgcagtattagcttcactccctccatcaatgcagttggatcttcttgttcagatgagggagagagtgatggctgaaaacaggcagaagtaccagaaaattaaaaaggaacctgcaaaattctcagagctccaaatacagtcgtacctgaaaactgttgctttcaggcgagagatagatgaagttcagaggggtgctgcaggcaggggtgttggaggcgtccaaacatcaaaaatagcatctgaagctaacagagagttcattttctcatcatcattcactggtgataaacagacattagcacaaagaggcggaaaggagcatattgtcgatagcattaaatcaaagagggaaatcaatcctgctgtcttcaaatccaatcccactagtagttctagctcaattaagcctaacaacagtgagcctttggggagttttggacctgatgttgagacatatcgtgatgagagaggaaggattagagtaagtagggtcaaagcaatgggaattcgtatgactcgtgatattcaaaggaatttggattttatcaaagagcatgaacaggtcagaaacagggggcatgactctgtagttgaaggattagctaacaatgaagagcctccagattttccagaacatctttttgaaggtaatgggctgcggagttctcttcatctcagcgaagattatgatgaaactgctagcgataaccatcacacatcatcactagtaggatctgacaaaatttctgagggtgattatcatggaagcaaagaaacaatagagatatcctttgctgacgatcaaacagaagtgaaggacaatgatgaccaaattttcttgcatttagcttctggagcttcatccaacttattcactacagaacagactgatggctctgattgcattacaaaagaaggcgtacttgaaagtgaaacacctcctatgcaagttgatgagaaggatcaccaagcatcactgatggacaatttctgtactgatgatgagatagagtgggaagaaggtggttgtgatgttcctggaggtccttccagtaatgaaaacgatcaatctaaagtaccgaaaggagatctagaagaagatgcccttgttcaggaagctataaggagaagtttagaggattttaagaagcaagaacatgaaaatgtgacccctgaagatttacaggcatcttttgaagacaaacctttgcaatcttatgatgatgttcctaagccagctggagctgcaggaaagacagctgataaaattgggaaggaaataaattgtgaagagaatgatatagtgcatggatcacttgtagttgatggacgagaaaacgagaatcagactcaacccgagaatagtgatgggcatgccgatatgaagagagcttatttgttggatcctctccctccatgtaatatgaccgccagtactagtgctgcaaaatcacctgagggctcagaagttcagcaccacaattcaatgttacattcaatcagaactcccgagtggcctaagaacgatagcgataaagttatgacgcaatacagtttgaattctgataattcaaagtgcaaaatagatgattcttgtactggagaaacctcgaggtcactccaaaatgaccttttgatggatgaactggttcctgacactgctgtacaaaaagaaaatatgatccagagaactacggacttatccacatctgagataaactatacgaaactgaacgataatgttggtatatatagtgtgtcagctagtaatctagaaaaggaattatctcttctgagacaggaacaagaatatctcggaaatgaaaggcggaagcttgaaagccacgcagagtctgtcagcagtgagatgtttgctgaatgccaggaattgcttcaaatgtttggcttgccatatataattgcacctatggaagctgaagctcagtgtgcatacatggaaatgactaaccttgtcgatggagttgttactgatgattcagatgttttcctgtttggtgcaaggaatgtttataagaacatatttgacgataggaaatatgttgaaacatacttaatgaaggacattgagtctgagcttggtctaacaagagaacaattaatacgtatggcaatgcttcttgggagtgactacactgaaggaattagtggcattggcattgtgaatgctattgaagttgcacacgcatttcctgaggaagatgggctccaaaagttcagggagtgggttgaatcaccagatccaactttactgggaaaacttggtatggaaagtggtagcagctcaaagaaaaaaaagtctggcagaaatcattcagacggaaagggaaacagccttgagcctgaatacgctaaaggttctgatgacagccaatcttctaatgagacccaacgcatcaaggaaatatttatgagtaagcataggaatgtgagcaagaactggcatattccttctacttttcctagtgaagcagtcataaacgcatatatttccccacaagttgatgattcaacagaaccattttcctggggaagaccagattcaggcttactgcgcaagttatgttgggaaaggtttgggtggagcaaggaaaaggctgatgaactgctaattcctgttttgagagagtataataagcacgagactcaactacgcatggaggcgttttactcattcaatgagagatttgcaaaaattcgtagcaaaaggattaagaaagctatcaagggtattacagggaaaagctttctagagacagatgaacttgatcatgatagtcccagtactagtaataccagcaagaagaaagagagaacctcctctggtcgtggtagggctaaagggcaaagaaccaaagatgttgggcctggtaacacaggaaatcaggactatgacattgctgatagcttagtagatgcaggtgaacatactacagaaaaaagcacgtccagtaagaaaagaactgcaaactcctctggtggttcaagaggcaaaggaagaagaagcatgaatgctgcacatgtgataattggaaatggggaagattctgatgtctctaatttagcatctgatgaggattcccatattagacataccaacgactatgaatcagagggattgacattacgcaggtcaaataggaagcgtaagcaggtcacatacgcggaagatggtcaggaagctgatgataatgatgtttccatacatcaaatcgatgaaaatcagggccaaggttctttggaggaggacatgtgtcacatggctggacttgacacacaatctaatctgctccatcaggatacgagtgaattaaacatcgatcaaacgcatacagatccctctgatatgaacgaagatccttcgggctttgagttacccgaggattgccatacggacactgcaccaaaagactatctcttcaccggtggtggattctgcatggaagagggtgacgagcaagatacgggagtggatcaatctggtgcagaaatggagcatgaaacacgtgatgcctgtgagggtattgacgaggtttctgaaagtcaaagcggtaaaagcatgagctattcggcgactggagagggcacagagaatgcaaatacagaggcccgaggggcgtcttcatcgcagggacgcaatgcaagccgtggttcaggtgccgtgccgaagcttacaaagcgtaggagaaaatcatga

SEQ ID NO: 669 - protein, 1470 aa, Oryza sativa
MGVHGLWELLAPVGRRVSVETLAGKRLAVDASIWMVQFMRAMRDDKGDMIRDAHLLGFLRRICKLLFLRARPVFVFDGATPALKRRTLAARRRHRDAAQAKVRKTAEKLLLSHLKARKLEELAAQIKSDRAKHDNKGKQVESSKMGEIEKINGEQKKNNDGENSGGIVAPIDQEKLDELLAASLAAEEEANLTGKGKQYTVSVPLQEAADISEDDDEDDGEMIFPMTTGDIDPAVLASLPPSMQLDLLVQMRERVMAENRQKYQKIKKEPAKFSELQIQSYLKTVAFRREIDEVQRGAAGRGVGGVQTSKIASEANREFIFSSSFTGDKQTLAQRGGKEHIVDSIKSKREINPAVFKSNPTSSSSSIKPNNSEPLGSFGPDVETYRDERGRIRVSRVKAMGIRMTRDIQRNLDFIKEHEQVRNRGHDSVVEGLANNEEPPDFPEHLFEGNGLRSSLHLSEDYDETASDNHHTSSLVGSDKISEGDYHGSKETIEISFADDQTEVKDNDDQIFLHLASGASSNLFTTEQTDGSDCITKEGVLESETPPMQVDEKDHQASLMDNFCTDDEIEWEEGGCDVPGGPSSNENDQSKVPKGDLEEDALVQEAIRRSLEDFKKQEHENVTPEDLQASFEDKPLQSYDDVPKPAGAAGKTADKIGKEINCEENDIVHGSLVVDGRENENQTQPENSDGHADMKRAYLLDPLPPCNMTASTSAAKSPEGSEVQHHNSMLHSIRTPEWPKNDSDKVMTQYSLNSDNSKCKIDDSCTGETSRSLQNDLLMDELVPDTAVQKENMIQRTTDLSTSEINYTKLNDNVGIYSVSASNLEKELSLLRQEQEYLGNERRKLESHAESVSSEMFAECQELLQMFGLPYIIAPMEAEAQCAYMEMTNLVDGVVTDDSDVFLFGARNVYKNIFDDRKYVETYLMKDIESELGLTREQLIRMAMLLGSDYTEGISGIGIVNAIEVAHAFPEEDGLQKFREWVESPDPTLLGKLGMESGSSSKKKKSGRNHSDGKGNSLEPEYAKGSDDSQSSNETQRIKEIFMSKHRNVSKNWHIPSTFPSEAVINAYISPQVDDSTEPFSWGRPDSGLLRKLCWERFGWSKEKADELLIPVLREYNKHETQLRMEAFYSFNERFAKIRSKRIKKAIKGITGKSFLETDELDHDSPSTSNTSKKKERTSSGRGRAKGQRTKDVGPGNTGNQDYDIADSLVDAGEHTTEKSTSSKKRTANSSGGSRGKGRRSMNAAHVIIGNGEDSDVSNLASDEDSHIRHTNDYESEGLTLRRSNRKRKQVTYAEDGQEADDNDVSIHQIDENQGQGSLEEDMCHMAGLDTQSNLLHQDTSELNIDQTHTDPSDMNEDPSGFELPEDCHTDTAPKDYLFTGGGFCMEEGDEQDTGVDQSGAEMEHETRDACEGIDEVSESQSGKSMSYSATGEGTENANTEARGASSSQGRNASRGSGAVPKLTKRRRKS

SEQ ID NO: 670 - DNA, 5115 bp, Populus trichocarpa
atgggagtccaaggtctgtgggacttgctggctcccgtcggccgtcgagtatccgtagaaactctagccggcaagaaattagccatcgatgctagtatatggctggtccagttcatgaaggcgatgagagacgacaagggagagatggtacggaacgctcatttgcttggcttctttcgtcgaatttgtaagcttttgtatctccgcactaagcctgtcttcgtcttcgacggtgccacccctgctctcaagcgccgcaccgtcatcgctcgtcggaggctgcgagagaacgcccaggctaagatccgcaaaaccgctgagaaattgcttcttaatcaactgaagtcaatgaggctgaaagaactggcaaaggatcttgagaagcagaatgctgctaataagaagggcaagcagacgaagattttggaagagaataaacgtgtgctgtctgagtccgaaaagcttgatgaaatgctggcagcgtccattgctgctgaggaaggtgggagtttagataacaatgcatccacatctgctgctgctgctttggaggacatggatagcgatggagatggagatgaagagatgattttgccaccaatgaatgaggttgaagacccagctgtcttagctgctttgcccccattaatgcaacttgatcttctgttggagaaccagaatgacaagcacaaaaataatgcaaagggcaaggaaattttgtcggatcatactgaatttgaagggagcaatatgggaagagatcacgtggcagcagagagttacaatcaggagaagttagatgaaatgttggcagcatctatggtggctgaggaggaaggcagtgatgaagatgaagagatgatactgccacatgggaaggttgatcctgctgttttagcagctctgccaccatcaatgcaacttgatcttctggtccagatgagagagaaattgattgctgaaaacagacaaaggtatcaaaaagtcaagaaggtgcccgaaaaattctctgagcttcaaattcaggcttatcttaaaactgttgctttccgtcgtgagatagatcaagtgcagaaagctgctgctgggaatgatgttggtggtgttcaggcttcaaggatagcttctgatgcaaaccgagaatttattttctcatcatccttttctggggataaagagttgcttacaactgatggagtgaagagaagagaaggacatgagcaacaaaaggaaccattaaagcaaccatcttcagattttgtggctggtgttgcatctatctgtaagtccaatactgtgacaggattttcccaggatgaatctagcagtgcttttgatgatgatgttgagacatatcttgatgaaagaggtcgtatgcgagtcagtagagtcagagccatggggatgcacatgacccgtgatttgcaaaggaacttggatttaatgaaagaaattgaaaaggagaaaacgctttctatcaagactccaagtgctcggtctgtgcataacagaaataagattggtacccccagatgttttcccaatgaaaatcataatggagaaagttcacatggtatcgatggcaactccactaacttgaacaagatgaacgagcagtccttgttgagtaatgagacttctgtgcagatatcatttgaagttggtgacgagagcaagcattttagcagtgatgacgaagtgtttgcttctttagtagctgaaaagcctgtaaaaatctcttctgctggcaatagtacatcaagaagatattctgatgattctgcttctgatagtgactgggaggaaggaattgttaaaggaaaagctaatagttctcctaatgatgttgaattaagaactaagctgtctcctaaggttagcaatgttagcgatgatagtgaagtggaatggatggaaggagattctgatattcatgataactcctcctatctagctgaatcaaaaagaaaactagtttccaaaggtactttggaagaagaagctgctttgcaggatgctattaggagaagtcttcatgataagtcctcatatccagctaaatcaagaaatcaagtttctggaggttctatagaagatgaggctggtttgcaggatgccataatgagaagtcttaatgatcttgggagtgaaaaatccatccactcagaatctgaccctaaaaatgttaaaagctctagagggcatgcttatgaaggtgtgggctttctcaatcaagaagataatggttcagctatgctcaggaaggatgctacccaacaaagcaaatcaatctctgaaattttgggttttgaaaacctaggtgatgcaggtgaagttaatatctcacaagcctttccatctgtgggtagccaattaaagtcatctaaagctcataatcctgatgatgtggtgatgctaataaatgaatcacgtgaaagttatgtgcattctaatcctgcctggataagccaagatgtggataaaagggagaatgggtgccaaggcatgccatctattgaatcaattggccctttggaagcaaaggagaaccacttgaatttggaacctgcttctgaaattgagaatggtgggttatctgcctcccatgagaagtattcaagagatggctctcataccgctatagcagcatctacttatctacctcttactgagctaattgatgatagaaatgataagaaagcagagccatccatgttcattggtggagagaaaattagttctgaggctgagccaccatgcctttcagttgagaactctttcccagaagattcagtgaatggcagtgattttgcagagaaacttgatggagaaaaaaaagcagaagaccatcttagtgaaagggaatgctatatcagcaaatctgcatccatggataatgagaatgaacaggtcaattttacagaggctagtttggagaaggaaatgctaatactagatcaagaatatagtaatctaggagatgaacagagaaagcttgagcgtaatgcggaatcagtcaccagtgagatgtttgcagaatgtcaggagctgctgcagatgtttggcttaccatatattatagcaccaatggaagcagaagctcaatgtgcttatatggaacttgcaaattatgtcgatggtgctgtgactgatgattctgatgtcttcttgtttggagctcgaaatgtgtataagaatatatttgatgatcgtaaatatgtggagacatacttcatgaaggatatcgagaaagagcttggtctatcaagagagagattaattcgcatggctctgcttcttggaagtgattataccgagggagttagtggcattggcattgtcaatgctattgaggttgtgactgcattccccgaggaggatggccttcaaaaattcagggattggattgaatcaccggatccagctatcctaggaaagtttgatgttcaaactggtctgggtgtgaggaaaaaagagtcaaaggttggtggtagtgaagcaaaatgcacaggtaatggcatggaagggacgaatccatctggcctaaacattcctcaagctcatgaagaaaagcaatctgcagatcattctcaagtgataaagcaggttttcatggataagcatgtaagttcttacataattagtcatttccttgctgacacatacttcagctatcagcatgatagaaaagatcccaaatttaaatttgtacagagaaatgtgagcaagaactggcacattccttcttcttttccgagtgaagcagtcatttctgcgtattcttgtccgcaagtggacaaatcaactgagcctttcacgtggggaaaaccagatcttcatgctcttcacagattatgctgggaaaagtttgggtggcacattcagaagtcagatgagttgctacttcctgttctgaaggagtataataaacatgagactcaactacgactggaagcattttacagtttcaatgaaagatttgcaaaaattcgtagcaagagaatcaagaaggctgttaaagggatcactggaaaccaagacgctgacatgatggatgatcctgtggaagaagtttctaaaagtagaactggaaatatatctgggaaatctggtgacaatgaacctcagacacattcaaagagaactgcaagaactgctcctggcaataagagtagttttctggaaaaatcaaaaccaaagtggtccaggaaaaggactgctgagcagcctgtttttcctgaagttgagaatacagaggcaactgttaggccatgtagcgatagaggattcctaagaaacggaaaaggtagagggagaggtcggggaagaggaaggggaaggggaaaggcaaatctttgttttgaacaatcagattcaagctcttgtgatgttgatagtggtcatgatgagcatgaagtgcatgttgatgagtcaagtggcccacatgaattgcggaagtcaacacggttgcggaagcctgtaaattacacagtcgatgacttagaaattgatgatgtggagaagtccttggaccagggtgataaagaggggtttgacaaagaggcactgcatcaaggtttctcttcttctcaagaagcacgtggagatggtggcattggcatcaaagacaatgaacaacttgaagtgggagattcttcacttcagagcttctccagggattatcttgaagggggagatggattttgctttgatggagaggaagttggtgtccctggcgtggaccgaaatagctatttttcaaaggttgaactttctgatgatcaccttgaaaggggaggtggtttttgcctggacgaaagtgacgcaggcatggaccaaggcactaaccaaaacccacctacaacgggtgatcttttggaagatgttgagcatggcactgagctcttgaatgaggtcagagatggagggaggacgagtgcttgtgaaactgagttgaatgcagacagcgtggttgcagcagcacatgctggtggtcatttaaggagcagcgtctctggcccagaaataactaagaatgagacgggggcaactggtggtgcaggaagtctaagtgcaatgccgtacctgcttaaaagaaaacggaggaaaatgtga

SEQ ID NO: 671 - protein, 1704 aa, Populus trichocarpa
MGVQGLWDLLAPVGRRVSVETLAGKKLAIDASIWLVQFMKAMRDDKGEMVRNAHLLGFFRRICKLLYLRTKPVFVFDGATPALKRRTVIARRRLRENAQAKIRKTAEKLLLNQLKSMRLKELAKDLEKQNAANKKGKQTKILEENKRVLSESEKLDEMLAASIAAEEGGSLDNNASTSAAAALEDMDSDGDGDEEMILPPMNEVEDPAVLAALPPLMQLDLLLENQNDKHKNNAKGKEILSDHTEFEGSNMGRDHVAAESYNQEKLDEMLAASMVAEEEGSDEDEEMILPHGKVDPAVLAALPPSMQLDLLVQMREKLIAENRQRYQKVKKVPEKFSELQIQAYLKTVAFRREIDQVQKAAAGNDVGGVQASRIASDANREFIFSSSFSGDKELLTTDGVKRREGHEQQKEPLKQPSSDFVAGVASICKSNTVTGFSQDESSSAFDDDVETYLDERGRMRVSRVRAMGMHMTRDLQRNLDLMKEIEKEKTLSIKTPSARSVHNRNKIGTPRCFPNENHNGESSHGIDGNSTNLNKMNEQSLLSNETSVQISFEVGDESKHFSSDDEVFASLVAEKPVKISSAGNSTSRRYSDDSASDSDWEEGIVKGKANSSPNDVELRTKLSPKVSNVSDDSEVEWMEGDSDIHDNSSYLAESKRKLVSKGTLEEEAALQDAIRRSLHDKSSYPAKSRNQVSGGSIEDEAGLQDAIMRSLNDLGSEKSIHSESDPKNVKSSRGHAYEGVGFLNQEDNGSAMLRKDATQQSKSISEILGFENLGDAGEVNISQAFPSVGSQLKSSKAHNPDDVVMLINESRESYVHSNPAWISQDVDKRENGCQGMPSIESIGPLEAKENHLNLEPASEIENGGLSASHEKYSRDGSHTAIAASTYLPLTELIDDRNDKKAEPSMFIGGEKISSEAEPPCLSVENSFPEDSVNGSDFAEKLDGEKKAEDHLSERECYISKSASMDNENEQVNFTEASLEKEMLILDQEYSNLGDEQRKLERNAESVTSEMFAECQELLQMFGLPYIIAPMEAEAQCAYMELANYVDGAVTDDSDVFLFGARNVYKNIFDDRKYVETYFMKDIEKELGLSRERLIRMALLLGSDYTEGVSGIGIVNAIEVVTAFPEEDGLQKFRDWIESPDPAILGKFDVQTGLGVRKKESKVGGSEAKCTGNGMEGTNPSGLNIPQAHEEKQSADHSQVIKQVFMDKHVSSYIISHFLADTYFSYQHDRKDPKFKFVQRNVSKNWHIPSSFPSEAVISAYSCPQVDKSTEPFTWGKPDLHALHRLCWEKFGWHIQKSDELLLPVLKEYNKHETQLRLEAFYSFNERFAKIRSKRIKKAVKGITGNQDADMMDDPVEEVSKSRTGNISGKSGDNEPQTHSKRTARTAPGNKSSFLEKSKPKWSRKRTAEQPVFPEVENTEATVRPCSDRGFLRNGKGRGRGRGRGRGRGKANLCFEQSDSSSCDVDSGHDEHEVHVDESSGPHELRKSTRLRKPVNYTVDDLEIDDVEKSLDQGDKEGFDKEALHQGFSSSQEARGDGGIGIKDNEQLEVGDSSLQSFSRDYLEGGDGFCFDGEEVGVPGVDRNSYFSKVELSDDHLERGGGFCLDESDAGMDQGTNQNPPTTGDLLEDVEHGTELLNEVRDGGRTSACETELNADSVVAAAHAGGHLRSSVSGPEITKNETGATGGAGSLSAMPYLLKRKRRKM

SEQ ID NO: 672 - DNA, 4470 bp, Sorghum bicolor
atgggagttcacgggctgtgggaactgctggctccggtcgggcgacgcgtctcggtggagacccttgcggggaagcgggtggcggtggacgcgagcatctggatggtgcagttcatgcgggcgatgcgggacgacagcggcgagatggtccgggacgcccacctcctcgggttcctccgccgcatctgcaagctcctcttcctccgcgtccgccccgtattcgtcttcgatggcgccacgccggcgctcaagcgccgcaccctcgccgcccgccgcaggcaccgtgacgccgcgcaggccaaggtccgcaagacagccgagaagctcctgctctcccatctcaaagcgaggaagcttgaagaattggcagaacaaatccggagtgacagggctaagcatgatgccaagggcaaacaagttgagagcagtaaagaaggagaaactgagaaaacaagtcaaaaccaaattggtgataccaacaacagtgagggaaatgctgcatcaatcaatcaggagaaagtggatgaaatgctggccgcatcacttgctgcagaggaagaggcagatttcactgacgaaggaaaacaccattttacaagtgttccgttgccagaaggagctgaaattgatgaggatgaagatgatgatgaagggatgatcttccctatgacaactggtgacattgatcctgcagtattggcttcccttcctccatcgatgcagttagatcttcttgttcagatgagggagagagtgatggctgaaaacaggcagaaataccagaaaataaaaaaggaacctgcaaaattttcagagcttcaaatacagtcctatctcaaaacagttgctttccgtcgagagatagaccaagttcagaagtctgctgcagggaagggtggtggaggtgtccagacatcaaaaatagcatcagaagctaacagagagtttattttctcatcatcattcactggtgataaacagatgctggcacaaagacgtgaaaaggaacataatgttgagaacactaaatcaaaaaaggaaattaattcttctgtcttcacatctaacccaacaaatagtttgggaacaatgaagcctcccaacagcagtaaaccttcgagggattttgggcctgatgttgagacctatcgtgatgagagaggacgaattagagtaagcagggtcagagcaatgggaattcgtatgactcgtgacattcaaaggaatttagattttattaaagagaatgagcaggttaaaagtaagggacaaacgcagaccagtgttcacaatggatcaacaggcaatgaagaacctccagtttttccagagcatctttttgaaagtaacaagctccagagttcttgtaatcctgatgaggatctttctgaaactgacagagagaaccatcagacctcatcacaagtagaagcagcagataacatttctgagagttcttgtcatggaaacaaggaagcaatagagatatctttctcggttgatcaaactgaattgaaggatggcgatgaagatatatttttgcaactagtgtctgggtcgacatccaacatgttttctggcaataattgtttggttaaaaacacggaagaatctgaagattctgagtgtatttgggaagatggtgttattgaagcaggaacatctcctatgaaagttggcaagaacgatcataagtcatctctgccagagaattgcagcgatgatgagatggagtgggaggaaggtgatagctttgcacctggagttgcttctagtagtgaacataatccatgtaacgcaccaaagggggatttagaagaagcagctcttgtacaggaagcaataaggaggagtttagaggattttgagaagaaggcatctgagaatgtgagcactggagatatacaagaatctgttgaagatagatctttgcagttctccaataatgttcctaagatatctgaagctcttggtgaaaatgattcacattctggagtacctgttgttgaagagataaacaatgaaacaagaacagaaatcaattgtgataaggatgatatggtacagggcactggactacttggaattgatagacaagaaaatgaaacccgacctcaactggtgaaaaatgatgggcatctggggtctgtgcctctatgtactacattcacaagtaatctggctgaaaaaccatctaacagcacagaagctaacggtgaagatgtaatgatatttacaaccaaacttcctggaacagctgtaggcgattgtgataaaacttccaacctaaacattatgaattctgatcaatcaaaatgcagcaatgatattgcttcaactggagaaaccttgtcacatcaaaaggatcttttgattgatgaactgctagctgacactgctgaacaaaaagaaaatgctacccaagtagatctgaagtttgccacatctgagatagattatacacaaatttgtgacaatgatgacaaccatacaatatcagcgagttatgttgatgcagagctatctcgtcttagacaagaacagatagatcttggacatgaaaggcgaaaacttgaaagtcatgcagagtctgtaagcagtgagatgtttgccgaatgccaggaattgctccaaatgtttggcttgccatatattattgcaccaacggaagctgaagctcaatgtgcatacatggaaataaataacctcgttgatggagttgtcactgatgattcagacgtctttctgtttggagcaaggaatgtttacaagaacatatttgatgataggaagtacgtagaaacatattttatgaaggacattgagtctgagcttgggttaacacgagaacagttaatccgtatggctctgcttcttgggagtgactacactgaaggcgttagtggtatcggcattgtgaatgctattgaagttgtacatgcatttcctgaggaagatggactgcagaagtttaaagaatggattgaatcaccggatccatcaatatttggtaaactgcatgtggaagcaagtggtagatcaaagaaaagaaaacttggtggaaatgattcagatggaaagggtaaaggcctggaacctgaatgcattcaaggttctgatgataaacaatcttctaatgaggctgaacatgtaaaggaaatatttatgagtaaacataggaatgtgagcaagaactggcatatccctgcaacttttcccagtgaatcagttgtaaatgcatatatttctccacaagttgacaattcaatggagcctttttcctggggaagaccagatttaggcctactacgcaagttatgttgggaaaggtttggatggggcaaagagaaagctgatgaactgcttattcctgttttgagagagtataataaacatgagactcagttgcgcatggaggcattttattcattcaacgagagatttgcaaaaattcgtagcaaaaggattaagaaagccatcaagggcattacagggaaaagctttcttgacacagatgaacctgagccagataatcccagtactagcaagacgatcaagaagaaagaggcaaactcctcaagccatgccagaggtagaggaaaaaggaaaaacaattctggaatcaggaatatggaaagtcaagaagataatgtaggagataccaacagtttggcagatacagttgagattactagagaaaataacaataccactaagagaaaaagagggagcccctgtggtcgctccaaaggaagaggacgaagcaggacaaatgctggaaatgatgcaacaataagtcaggaggattatgaaatagagtattctacttcagcttcagatgaggattcatgtaaaaggcattccaacagttatggatcagaaggaagggcattgcgaaggtcaagtaggaagcggaaacaggtgacatacatggaagatggtcatgaagcatatgacaatgatgttccaatgcatcaaaacgatgaaaataacccaggccaagctgctgcagtcgcagacatggctggagaggacacagggtttaacctttaccatcaggatacaagtgaactgaacagcagtcggatgcatataggtgcaggcactaccgaagatatcaatgaagattcccaggactttgagttacgtgaggacaatcaggtggattcggcaccgaaagactatctgttcagtggtggtggtttttgtatggaggagggcgaaggcaacgaacaagaaccagcaggtcatcaatctggtgcagaaatagaacctgagccaagtggtccatgtgacgctatggatggagtttcagagagttgcaagagtgcgagcctgtcgaccgcgggagagtgtacagagaatgcaagcatggaggcccgtggtgcatcttcgtcgcagcagagacgcaaggcaagccgaggttttagtgccatgccgacgcttaccaagcgtaggagaaaatcgtga

SEQ ID NO: 673 - protein, 1489 aa, Sorghum bicolor
MGVHGLWELLAPVGRRVSVETLAGKRVAVDASIWMVQFMRAMRDDSGEMVRDAHLLGFLRRICKLLFLRVRPVFVFDGATPALKRRTLAARRRHRDAAQAKVRKTAEKLLLSHLKARKLEELAEQIRSDRAKHDAKGKQVESSKEGETEKTSQNQIGDTNNSEGNAASINQEKVDEMLAASLAAEEEADFTDEGKHHFTSVPLPEGAEIDEDEDDDEGMIFPMTTGDIDPAVLASLPPSMQLDLLVQMRERVMAENRQKYQKIKKEPAKFSELQIQSYLKTVAFRREIDQVQKSAAGKGGGGVQTSKIASEANREFIFSSSFTGDKQMLAQRREKEHNVENTKSKKEINSSVFTSNPTNSLGTMKPPNSSKPSRDFGPDVETYRDERGRIRVSRVRAMGIRMTRDIQRNLDFIKENEQVKSKGQTQTSVHNGSTGNEEPPVFPEHLFESNKLQSSCNPDEDLSETDRENHQTSSQVEAADNISESSCHGNKEAIEISFSVDQTELKDGDEDIFLQLVSGSTSNMFSGNNCLVKNTEESEDSECIWEDGVIEAGTSPMKVGKNDHKSSLPENCSDDEMEWEEGDSFAPGVASSSEHNPCNAPKGDLEEAALVQEAIRRSLEDFEKKASENVSTGDIQESVEDRSLQFSNNVPKISEALGENDSHSGVPVVEEINNETRTEINCDKDDMVQGTGLLGIDRQENETRPQLVKNDGHLGSVPLCTTFTSNLAEKPSNSTEANGEDVMIFTTKLPGTAVGDCDKTSNLNIMNSDQSKCSNDIASTGETLSHQKDLLIDELLADTAEQKENATQVDLKFATSEIDYTQICDNDDNHTISASYVDAELSRLRQEQIDLGHERRKLESHAESVSSEMFAECQELLQMFGLPYIIAPTEAEAQCAYMEINNLVDGVVTDDSDVFLFGARNVYKNIFDDRKYVETYFMKDIESELGLTREQLIRMALLLGSDYTEGVSGIGIVNAIEVVHAFPEEDGLQKFKEWIESPDPSIFGKLHVEASGRSKKRKLGGNDSDGKGKGLEPECIQGSDDKQSSNEAEHVKEIFMSKHRNVSKNWHIPATFPSESVVNAYISPQVDNSMEPFSWGRPDLGLLRKLCWERFGWGKEKADELLIPVLREYNKHETQLRMEAFYSFNERFAKIRSKRIKKAIKGITGKSFLDTDEPEPDNPSTSKTIKKKEANSSSHARGRGKRKNNSGIRNMESQEDNVGDTNSLADTVEITRENNNTTKRKRGSPCGRSKGRGRSRTNAGNDATISQEDYEIEYSTSASDEDSCKRHSNSYGSEGRALRRSSRKRKQVTYMEDGHEAYDNDVPMHQNDENNPGQAAAVADMAGEDTGFNLYHQDTSELNSSRMHIGAGTTEDINEDSQDFELREDNQVDSAPKDYLFSGGGFCMEEGEGNEQEPAGHQSGAEIEPEPSGPCDAMDGVSESCKSASLSTAGECTENASMEARGASSSQQRRKASRGFSAMPTLTKRRRKS

SEQ ID NO: 674 - DNA, 3787 bp, Vitis vinifera
atgggagtgcacggtctctgggaacttttggcccctgtcggtcgccgtgtgtctgtcgagactcttgccggaaaacgactcgccatagatgcgagtatatggatgatacagttcatgaaggcaatgcgagacgagaaaggagagatggtgaggaacggtcacctgttagggttcttccgacgcatatgcaagctcctcttcctacgcactaagcccgttttcgttttcgacggcggcacccctgccctcaagcgccgcaccgttgtcgctcgtcgccggcagcgagaaaatgctcaggccaagattcggaaaactgccgagaaattgctcctcaatcaccttaaggcaatgaggttaaaagaattggctaaggatttggagaatcagcggctgaacaacaatgataaggggaaaaaggttttatcatatcaaacggaaacggctggagaggtttctgaaggaaatagttcagtatccgggacttacaatcaggaaaagctagatgaaatgctttctttggtgcatcgaaaacatgtatgcttttcgaaattatgtttgaatctaggatgggaatgtactatcctttgcatgtatctgatatttagttttatgatgtatttgcaaaacagaatgaaatatgtcaagaaagttctcatcattatttgggttgacccaattatgaatggaaaagtcgatccagctgtattagctgcattgcctccatcaatgcagcttgatcttcttatgagagagaaattgatggcagaaaacagacaaaaatatcaaaaagtgaaaaaggcccccgcagaattttcagagttacaaatacaggcttatcttaaaaccgttgctttccgtcgggagatagatgaagtgcagaaatctgctgctgggaggggggtaggtggtgtgcagacttcacggatagcctctgaagccaatagagaatatattttctcctcatcatttactggtgataaagaagcacttacaaatggtggagtagagaaaaatggagataagcaatatcagataccaacagagtgtcctccagattccccaaataatgttgcatctaccagtaagtccaatactgccgcagaatcagttgcaggtgaacctgcaagtgtttttaatgatgatgttgagacatacctggatgagcgggggcgtgtccgagttagtagggtaagagctatgggaattcgtatgacccgagatctacaaaggaatttggatttgatgaaagagattgagcaggatagaactaatgaggataataacggaattgttacattaaacaaaacaaatgagcagtctatccctgacaatggggcttctatagagatatccttcgaagatgatggtgagcacaactgtttaaatggtgatgacgaattatttgctagtttggtagcaggaaatccagtgataatttcttcttctgatgctgctctctcaaacagacgaccagctgattctgcttcagattctgactgggaggagggaatcattgaagagaaaggtggtagctgtattgacaatgttggagtggaaattaaaccatctgttatggaagaaagagttagtgatgatagtgaagtggaatgggaggaaggaccttgtgatgtttcaaaaaatgtgtcagcatgcccatctaagtttggaaatcctgcttccaaaggaagattggaagaagaaactgatctccaggaagcaataaggagaagtcttgaagatttaggtggtgagaaagctgttggtgaatcatttaaagattcggatattaaggaatatgatgaaaaggatgttttggaggaaatgatgatccttgatcaggaatgcttaaatttgggagatgaacagaggaagcttgaaagaaatgctgattgtgtcagcagtgagatgtttgcagagtgccaggaacttctccaaatgtttggcttaccatatattattgcacctatggaagctgaagctcaatgtgcttatatggaacttgcaaaccttgttgatggagttgtaacagatgattcagatgtattcttgtttggagcacgaagtgtttacaagaatatatttgacgaacgcaaatatgttgagacctattttatgaaggacattgagactgagcttggattaaatagagaaaaagtaattcgcatggcactccttcttgggagtgattatactgagggtgttagtggaattggcattgttaatgctattgaagttttaaattcttttcctgaggaggacggtcttcataagttccgggagtgggttgaatcaccagatccaaacatcctaggaaaggttaatgttgaaactggatccagttcaaggaaacgaggatccaagaactggcacattccttcttcttttccaagtgaaacagttatctctgcatatgcctctccccaagtggaccagtcaacagagcctttctcgtggggaaaaccagatctttttgttcttcgcaaattgtgtttggaaaagtttggttggggtaaccagaaggctgatgagttgctactacctgttttgaaagagtacaacaaacatgagactcaattgcggttggaagcattttacactttcaatgagagatttgccaaaattcgtagtaagagaatcaaaaaggctgttaaaggaattaccgggagtcaaacctcagagttgttggatgatgctgtgcaagaaggttctaaacgtggaaagagaagcaaagagagtcctagtaaacttgacaacaaacaagaaattcctataaatgaaatagggagtactgctgctagaaatgggagcaatgctacagcaaaaacaactccaaagcagtcaagaagaagaaggatccgtaagcctgttccatctgatggagagagtgcagaacctcctgtgcaggcaggacagaagcaatgcaacgatacaggatcaagcaagaatggaagaggtaaaggaagaaagaaaggccggggagtcagaaggggaagaggaagaagtaggatacaagaaaatcctggctctgaaattagtggaaccagctccagtgactgtaacagtggcaatgaggaggaagttccagctcaaaagttggacgggtcaaatgaagtgcgaagggtaagtttttctctttcctgtgacccaatctatagcattggcatatattgttgttctggtagaaatagaacagagacctaaattcccttgggttggtttagttttcaggcatgctttgtctggttatggtttaaagatgtgaagagtccacagttcgtacattctagattggtgccttgcgcaaaccaatctaagttggggactgaagcaatttttttttttttttttaatttttaatttttacatgttctttataatcttccagtcaaaacgtcctcggaaggctgtgaattatgctaatgatgacttagaaattgatgacgagggcaagtcattagaccaaggcaaccaaaagtgcaccaatgaggaggcagtggagcttgagccatctagagatcagattatatgtggagatgctgctgctgatttcagtggaaagaaccaacaaaaagctgaagattcttcacctggagaagacttgtgtggagactacccagaaacagaaggtgtcatgtgcatggatgaaaatgaaataggtcagttagattcaagagatgatgatcccacttttgcggatgaattttctgaagattaccttaaaatgggaggtggattttgtgtggaagaagatgagaaagataaggaccacaatgctcgcacatatgac

SEQ ID NO: 675 - protein, 1066 aa, Vitis vinifera
MGVHGLWELLAPVGRRVSVETLAGKRLAIDASIWMIQFMKAMRDEKGEMVRNGHLLGFFRRICKLLFLRTKPVFVFDGGTPALKRRTVVARRRQRENAQAKIRKTAEKLLLNHLKAMRLKELAKDLENQRLNNNDKGKKVLSYQTETAGEVSEGNSSVSGTYNQEKLDEMLSLVHRKHVCFSKLCLNLGWECTILCMYLIFSFMMYLQNRMKYVKKVLIIIWVDPIMNGKVDPAVLAALPPSMQLDLLMREKLMAENRQKYQKVKKAPAEFSELQIQAYLKTVAFRREIDEVQKSAAGRGVGGVQTSRIASEANREYIFSSSFTGDKEALTNGGVEKNGDKQYQIPTECPPDSPNNVASTSKSNTAAESVAGEPASVFNDDVETYLDERGRVRVSRVRAMGIRMTRDLQRNLDLMKEIEQDRTNEDNNGIVTLNKTNEQSIPDNGASIEISFEDDGEHNCLNGDDELFASLVAGNPVIISSSDAALSNRRPADSASDSDWEEGIIEEKGGSCIDNVGVEIKPSVMEERVSDDSEVEWEEGPCDVSKNVSACPSKFGNPASKGRLEEETDLQEAIRRSLEDLGGEKAVGESFKDSDIKEYDEKDVLEEMMILDQECLNLGDEQRKLERNADCVSSEMFAECQELLQMFGLPYIIAPMEAEAQCAYMELANLVDGVVTDDSDVFLFGARSVYKNIFDERKYVETYFMKDIETELGLNREKVIRMALLLGSDYTEGVSGIGIVNAIEVLNSFPEEDGLHKFREWVESPDPNILGKVNVETGSSSRKRGSKNWHIPSSFPSETVISAYASPQVDQSTEPFSWGKPDLFVLRKLCLEKFGWGNQKADELLLPVLKEYNKHETQLRLEAFYTFNERFAKIRSKRIKKAVKGITGSQTSELLDDAVQEGSKRGKRSKESPSKLDNKQEIPINEIGSTAARNGSNATAKTTPKQSRRRRIRKPVPSDGESAEPPVQAGQKQCNDTGSSKNGRGKGRKKGRGVRRGRGRSRIQENPGSEISGTSSSDCNSGNEEEVPAQKLDGSNEVRRVSFSLSCDPIYSIGIYCCSGRNRTET

SEQ ID NO: 676 - DNA, 1191 bp, Aureococcus anophagefferens
atgggcatcaagggcctcatgggcgtcatcaacgagcacgcgcccggcgccgtcaaggagctcgtcatcgagggctacacgggccgcgtcgtcgccatcgacgcgtccatgagcctctaccagttcctcatcgcgatccgccaccagggcgagggcggcgcgccgtcgagcgtgctcacgaacgccgagggcgagcagacgtcgcacatccagggcatgttcaaccgcacgatccgcctgctccaggcgggcgtccgccccgtctacgtcttcgacggcaagccaccgaacatgaagggcggcgagctcgcgaagcgcacggcgaagcgccaggaggccgaggccgcgctcaagaaggccacggagaacgacgacgccgagggcatctccaagtacagcgcgctgctcaccaaggtctcgcggaaggactgcgacgacgtcaagcagctcctgcggctcatgggcgtgcccgtcgtcgacgcgccgtgcgaggccgaggcgcagtgcgcggagctcgtccgcggcggcaaggcccacgccgtcggcacggaggacatggacgcgctgaccttcgggtccacgcgccagctccgcaacatgacgttcacgaagaagtccaaggacgacaaggtcctcgagatcacgcacgcggcggtcctcgagggcctcggcctctccaacgccgagttcgtcgacttctgcatcctctgcggctgcgactacacgtcgacgatccgcggcgtcgggcccaagacggcgctgaagctcgtcaaggagcacggctccatcgaggccatcctcgccaagggcctcaaggccaagcagaggggcgacgtgcccgacgagtgggacgacgcggacgacggcccgttcgtgccggcctacgtcggcgcgcggaacctcttcaacaaccacgaggtcacgccctgcggcgacgtggagctgagctggggcaagccggacgaggcgggcctccgcgcgttcctcgtcgagcgcatgggcttcggcgagcagcgcgtcgagggcgcgctcaagcggctgacgtcggcccagggccagcgcacgcagcgccgcatggacagcttcttcaaggtgctcccgccgaagccgggcgcggcaccgaagaagcggcccgcgccggagaagaaggcgccggcgaagaagaagggcaagggcccgccgcgcaagtga

SEQ ID NO: 677 - protein, 396 aa, Aureococcus anophagefferens
MGIKGLMGVINEHAPGAVKELVIEGYTGRVVAIDASMSLYQFLIAIRHQGEGGAPSSVLTNAEGEQTSHIQGMFNRTIRLLQAGVRPVYVFDGKPPNMKGGELAKRTAKRQEAEAALKKATENDDAEGISKYSALLTKVSRKDCDDVKQLLRLMGVPVVDAPCEAEAQCAELVRGGKAHAVGTEDMDALTFGSTRQLRNMTFTKKSKDDKVLEITHAAVLEGLGLSNAEFVDFCILCGCDYTSTIRGVGPKTALKLVKEHGSIEAILAKGLKAKQRGDVPDEWDDADDGPFVPAYVGARNLFNNHEVTPCGDVELSWGKPDEAGLRAFLVERMGFGEQRVEGALKRLTSAQGQRTQRRMDSFFKVLPPKPGAAPKKRPAPEKKAPAKKKGKGPPRK

SEQ ID NO: 678 - DNA, 1617 bp, Aureococcus anophagefferens
atgggcataaaaggcctcttcccctacatccgggacaatgcgccgggcgccatcgtcgagacctcattgaaggactacatgggccggcgcctcgccgtcgacgcgtccatgcacctctactcgttcctcgcggccatccgcacgggcggcgacgcgacgcacctcacgaactcgcgcggcgaggcgacgagccacctccagggcttcgcgaaccgcacgctgcgcatgctcgaggccggcgcgaagcccgtcttcgtcttcgacggcgcggcgcccgagctgaaagggaagacgctcaagggccggagcgaggcgaagcgcgccgccgaggagaagctggcccgggcgcgcgacgccgactccggcgcgacgacggaggaggtctacaaggcggcgtcggcgtcgacgcgcgtgacgcggcagcacaacgacgacgtcaagcggctgctccgcctgatgggcgtgcccgtcgtcgaggcgcccggcgaggccgaggcgtcgtgcgtcgctcttgttaggcacggcgcctgcgacttcgtcgtcacggaggacatggacgcgctgaccttcggcgcggcgaagatggtgaagaacctcttcgacgtcgagggcgcgcgcgccaaggagaagcggcccgcgtacgagatcgacctcgccgcggcgctccgcgagctcgggccccggggcctggggaccatggcggcgttcgtcgacttctgcattttgtgcggctgcgactacctcgaccacgtgccgggcgtcgggcccgcgacggccgcgaagcttctgaagagccacgcaagcctcgagcgcgccgtcgtccgcgtcggccgcaaggtcggcgggcggcccgtcgcgccgcacggctgggacttccgcgccgcgcgcgcgctcttcttcgcgccgaccgtcgtcgccgccggcgagaccgtcgacgcgccgccgccggactacgcggcgctccgcgcgttcctcgtcgacggccacgagttcaacggcgaccgcgtcgacaagatggtcgcgcggctccgcaagtgccgcgaggccaagccccagaagcgcatcgacgacttcttctccaagagcccggccaagggcccggcccggagcccaccggcgaagcgggagccggagcccgcggcgaagccggagccggacggcgcggcgaagcgggagccggagcccgcggcgaagcgggagccagacggcgcggcgaagcgggagccggacggcggcgacgacatcggcctcgacgcgtacgtcgacgcgcgacaggagcggcggggcgcgccgccggccgccgcgccggcgccggcgccgcccgcggcgaagccggagcccggcgcgcgctcggtcgagccggagcccgccgccgcgcggcctcgagcgccgccgccctcgtcgccggcgtcgccgcgggccgccgcgcccatgtcgcccgcgtgccaggctttcttcagcggcgagctccgggacatctcggcgtcggcgtcgaagaagcgcaagtcgccggcgaagcggccgaagccggccgcgtccgccgaggtcgcgcgcgcgttcttcgccggcgagacgcgcgacgcgacgccgagcaagaagaagaagaaggcgggctaa

SEQ ID NO: 679 - protein, 538 aa, Aureococcus anophagefferens
MGIKGLFPYIRDNAPGAIVETSLKDYMGRRLAVDASMHLYSFLAAIRTGGDATHLTNSRGEATSHLQGFANRTLRMLEAGAKPVFVFDGAAPELKGKTLKGRSEAKRAAEEKLARARDADSGATTEEVYKAASASTRVTRQHNDDVKRLLRLMGVPVVEAPGEAEASCVALVRHGACDFVVTEDMDALTFGAAKMVKNLFDVEGARAKEKRPAYEIDLAAALRELGPRGLGTMAAFVDFCILCGCDYLDHVPGVGPATAAKLLKSHASLERAVVRVGRKVGGRPVAPHGWDFRAARALFFAPTVVAAGETVDAPPPDYAALRAFLVDGHEFNGDRVDKMVARLRKCREAKPQKRIDDFFSKSPAKGPARSPPAKREPEPAAKPEPDGAAKREPEPAAKREPDGAAKREPDGGDDIGLDAYVDARQERRGAPPAAAPAPAPPAAKPEPGARSVEPEPAAARPRAPPPSSPASPRAAAPMSPACQAFFSGELRDISASASKKRKSPAKRPKPAASAEVARAFFAGETRDATPSKKKKKAG

SEQ ID NO: 680 - DNA, 1149 bp, Aquilegia sp.
atgggtataaagggtttaacaaagttattagcggacaatgcaccaaaaggcatgaaagagcataaattcgagagttttttcggccgtaagattgccattgatgctagtatgagtatctaccagtttctgattgtggtgggaaggagtggaaccgaaatgctaacaaatgaagctggtgaagtaacaagccacttgcaaggaatgttttctcgaactatcagacttttggaagcagggataaagcccgcgtatgtctttgacggtaagccgccagatctgaaaaagcaagagttggccaaacggtattcaaaaagggcagatgccactgaagatcttgcagcagcaattgagactggtgataaggaagacattgagaagttcagcaagcggacagtgaaggtaacaaagcaacacaatgatgactgcaagaaacttctaagactcatgggagtgcctgtaattgaggctccttctgaagcagaggcagagtgcgctgcactttgcaagagtggaaaggtatatgctgtggcctctgaagacatggattctttaacatttggagctcctaaatttcttcgacatttgatggatccgagctcaagaaaaatcccagtaatggaatttgaagttgcaaagatactggaggagctaaatctcagtatggatcagttcattgacttgtgtattctttgtggatgtgactattgtgacagtattcgaggtattgggggacagactgctttgaagctcatccggcaacatggttctatagaaaatatactggagaacataaacaaagagagataccaaatacccgaggattggccttatcaagaagctcgacagcttttcaaggagcctctagtatctgttgacaacgaggaatctgagttaaaatgggcgactccagatgaagaggggttaataacctttctggtgaatgaaaatggcttcaacaatgaccgagtcacaaaggctattgaaaagatcaaagcagccaagactaagtcttctcaaggccggttggaatccttctttaagccaatggccagtgcatcggttgctatcaaacgcaaggaaacaccagagaaggccacaaaggaaactacatcaaaaaagccaaaagctggtggccgaaagaagaaatag

SEQ ID NO: 681 - protein, 382 aa, Aquilegia sp.
MGIKGLTKLLADNAPKGMKEHKFESFFGRKIAIDASMSIYQFLIVVGRSGTEMLTNEAGEVTSHLQGMFSRTIRLLEAGIKPAYVFDGKPPDLKKQELAKRYSKRADATEDLAAAIETGDKEDIEKFSKRTVKVTKQHNDDCKKLLRLMGVPVIEAPSEAEAECAALCKSGKVYAVASEDMDSLTFGAPKFLRHLMDPSSRKIPVMEFEVAKILEELNLSMDQFIDLCILCGCDYCDSIRGIGGQTALKLIRQHGSIENILENINKERYQIPEDWPYQEARQLFKEPLVSVDNEESELKWATPDEEGLITFLVNENGFNNDRVTKAIEKIKAAKTKSSQGRLESFFKPMASASVAIKRKETPEKATKETTSKKPKAGGRKKK

SEQ ID NO: 682 - DNA, 1245 bp, Aquilegia sp.
atgggtataaagggtttgacaaagttattagcagccaatgcacctaattcaatgaaagaaacaacatttgagagctattcaggtcgcgagattgccgtcgatgccagtactagcatttatcaattccttattgtggtaggaagaaatggcacccaaatgttaaccaatgatgctggtcaagtaacaagtcatttggaaggaatttttacaagaaccattcgccttttggaagctggaatgaagcctgtttatgttttcgacgggaaaccaccagacttaaagaagcaggagctggctaaacggcactcaaggaggatggatgcctctgaatatttggcagctgctattgagagcggagtgaaaaaagacattgagaagtacagcaaacgaactgtgaaggttacaaagcaacataatgatgactgcaaaaagcttttaagactcatgggagtgccagtagttgaggcttcttctgaagcagaggcggaatgtgctacactatgcaaaactggaaaggtttatgctgtggcatctgaagacatggatactcttacctttggagctcccatatttgttcgccatttgatgggtagctcaagaaaatttccaacggtgcaatatgaagttgcaaagattttaaatgaacttaacttgactatggatcagttcattgatttgtgtattctctgtgggtgtgattattgtgacggcatacgaggtattgggggacaaactgctttgaagcttgttcgtcaacatggttccatagagaatatagtggagaagattaacaaagtaaggtaccagatacctgaaaattggccataccaagaagcacggtgtatttttaaagaccctgtagtatctgtcagcgaccagaatcacgtgattgaatggactactccagacgaggaggcgctcatcaacttcctggtgaatgaaaatggctttaatcataaccgagtcactaaggctattgacaagatcaaatcagccaagtacggatcatccaatggacggttacactccattaagccatggctgagaacatcagttccccttaaaagaaaggaaaccaaatgccagcttggcactctcagttcattccgcagccctaagatgttctctctgcaagtttatatgcatttgaggccaaaggtctttggctgctcaaaccctccaactgtggaaatgggtaccaagcaccctgagccgttctccagaactccctgcttcagtgcctga

SEQ ID NO: 683 - protein, 414 aa, Aquilegia sp.
MGIKGLTKLLAANAPNSMKETTFESYSGREIAVDASTSIYQFLIVVGRNGTQMLTNDAGQVTSHLEGIFTRTIRLLEAGMKPVYVFDGKPPDLKKQELAKRHSRRMDASEYLAAAIESGVKKDIEKYSKRTVKVTKQHNDDCKKLLRLMGVPVVEASSEAEAECATLCKTGKVYAVASEDMDTLTFGAPIFVRHLMGSSRKFPTVQYEVAKILNELNLTMDQFIDLCILCGCDYCDGIRGIGGQTALKLVRQHGSIENIVEKINKVRYQIPENWPYQEARCIFKDPVVSVSDQNHVIEWTTPDEEALINFLVNENGFNHNRVTKAIDKIKSAKYGSSNGRLHSIKPWLRTSVPLKRKETKCQLGTLSSFRSPKMFSLQVYMHLRPKVFGCSNPPTVEMGTKHPEPFSRTPCFSA

SEQ ID NO: 684 - DNA, 1161 bp, Brachypodium distachyon
atgggtgtcaagggtttgacgaagctgctggcggacaacgcgcccaaggcgatgaaggagcagaagttcgagagctacttcggccgccgcattgcggtcgacgccagcatgagcatctaccagttccttattgtagttggaaggacagggatggaaacccttacaaatgaagctggtgaagtcaccagtcatttgcaaggtatgtttaaccggacaataaggttgcttgaggcaggaattaaaccagtatatgtttttgatggcaagcctcctgacatgaagaaacaagagcttgcaaagagatatgcaaagagagaggatgccaccgaagagctgaccaaggcagtggagacaggagatacggatgcaattgaaagattcagcaagagaaccgtgaaagtcactaagcagcacaatgatgactgtaagcgactattaaggctgatgggtgttcctgttgtagaggcaccttgtgaagcagaagcacaatgtgctgccctttgcataaaggacaaggtgtatgctgtcgcatcagaagatatggactcgcttacttttggagctccacggtttgttcgtcatttgatggatccaagttccaggaaaatacctatcatggaatttgaagtcgcgaaaattctagaggagcttgaattcactatggaccaattcattgacttgtgtatcctctgtggatgtgactattgtgatagcattaaaggtattgggggcctaacagctctgaagcttattcgtcaacacgggtcaatagaaggcattctggaaaatattaataaagacaaatatcaaattcctgaggactggccttatgaagaagctcggcgcttgttcaaggaacccaatgttacattggatcttcctgagctcaaatggactgcacctgatgaggagggcctcgttaattttttagtgaaagaaaacggtttcaatcaagatcgggtgacaaaggccatcgagaagattaaatcagccaagaataaatcatcccaaggaaggctcgagtcgtttttcaagccaactgttagcacatcagtaccactgaagcgaaaggaaacttcagaaaaaccaacgaacgctgctgcaagcaagaaagcaaaatcgacccgtggaaagaagaaaatagttcgatgcgcgaagtga

SEQ ID NO: 685 - protein, 386 aa, Brachypodium distachyon
MGVKGLTKLLADNAPKAMKEQKFESYFGRRIAVDASMSIYQFLIVVGRTGMETLTNEAGEVTSHLQGMFNRTIRLLEAGIKPVYVFDGKPPDMKKQELAKRYAKREDATEELTKAVETGDTDAIERFSKRTVKVTKQHNDDCKRLLRLMGVPVVEAPCEAEAQCAALCIKDKVYAVASEDMDSLTFGAPRFVRHLMDPSSRKIPIMEFEVAKILEELEFTMDQFIDLCILCGCDYCDSIKGIGGLTALKLIRQHGSIEGILENINKDKYQIPEDWPYEEARRLFKEPNVTLDLPELKWTAPDEEGLVNFLVKENGFNQDRVTKAIEKIKSAKNKSSQGRLESFFKPTVSTSVPLKRKETSEKPTNAAASKKAKSTRGKKKIVRCAK

SEQ ID NO: 686 - DNA, 1152 bp, Brassica napus
atgggtatcaagggtttaacgaagcttttagccgacaatgcgcctagcgccatgaaagagcagaagttcgagagctacttcggtcggaaaatagctgttgatgcaagcatgagcatttaccagttccttattgtggtggggagagctgggactgagatgctcaccaacgaagctggtgaagtcactagccatttgcaagggatgtttaatcgaaccattcgtcttctcgaagctggaattaagcctgtgtatgtttttgatggaaagcccccggagttaaagagacaagaactagccaaacgttactccaagagagccgatgcaactgcagatttgagtggtgcaattgaggcaggaaacaaggaggacattgagaagtacagcaaacgaactgtgaaggtgacaaagcaacacaatgacgactgcaaaagactcttgaaactcatgggggtccccgtcgttgaggccacttccgaggcagaagcgcaatgtgctgcactttgcaaagcaggaaaggtgtatggtgtggcttctgaagatatggactccttaacttttggagctcctaagtttcttcgccacctgatggatcccagctccagaaagatccctgtcatggaatttgacgttgccaagattttagaagaactgcaacttaccacggatcagttcatcgacttgtgcatattgtcaggatgtgactattgtgacagcatccgaggtatcggagggcagactgccctaaagcttattcgccagcatggttctattgagacaatactcgaaaatataaacaaagaaaggtatcagatgcccgaggaatggccatataatgaagctcgtaaactttttaaagaacctgatgtcttaactgatgaagagcagctcgatatcaagtggacctctccagatgaagagggtatagttcagtttttggtgaatgaaaatggattcaacatggatagggtaaccaaggcggtagagaaaaccaaatctgcaaagaacaagtcatcccagggaaggctggagtcatttttcaagccagtcgctagctcatccgtgcctgctaaaagaaaggaaatccctgagagtaacgccaaaggagcagcaaataagaaaactaagggaggtggtgggaggaagaagaagtaa

SEQ ID NO: 687 - protein, 383 aa, Brassica napus
MGIKGLTKLLADNAPSAMKEQKFESYFGRKIAVDASMSIYQFLIVVGRAGTEMLTNEAGEVTSHLQGMFNRTIRLLEAGIKPVYVFDGKPPELKRQELAKRYSKRADATADLSGAIEAGNKEDIEKYSKRTVKVTKQHNDDCKRLLKLMGVPVVEATSEAEAQCAALCKAGKVYGVASEDMDSLTFGAPKFLRHLMDPSSRKIPVMEFDVAKILEELQLTTDQFIDLCILSGCDYCDSIRGIGGQTALKLIRQHGSIETILENINKERYQMPEEWPYNEARKLFKEPDVLTDEEQLDIKWTSPDEEGIVQFLVNENGFNMDRVTKAVEKTKSAKNKSSQGRLESFFKPVASSSVPAKRKEIPESNAKGAANKKTKGGGGRKKK

SEQ ID NO: 688 - DNA, 1191 bp, Chlamydomonas reinhardtii
atgggaattcacgggctcaccaagctgctgggcgacaacgcgccgggctgcattaaggagaccaaatttgaaaacctattcggtcgtaaggttgcagtagatgctagtatgcacatctaccagttcatggtggtggtcgggcgtcaaggcgaccagctgctcacgaatgaggctggagaaattaccagccacctgcaaggcatgtttttccgcacggcaaagatgctggaggcgggcatcaagcccgtctacgtctttgatggcaagcccccgcagctgaagcaggaccagctggcgcagcgcacggagcgcagggcggacgccaacgaggctctggagaaggccaaggaggcgggcgaccaggaggccattgagaagtacagcaagcgctccgtccgtgtcacgcgggagcacaacgacgagtgcaagcggctgctgcggctaatgggcgtgccggtggtggaggcgcccacggaggcggaggcgcagtgcgcggagatggccaagtcggggctggtgtacgggctggccacggaggacatggacgcgctcacgttcggcgcgccgcgcgtcatccgccacctcatggcgcccagcagccagaacgtgcctgtccaggagtttgaccgggaggtggccctgcgtgagctggagctgaccgacgaccagttcattgacctgtgcatcctcatgggctgcgactactgcggcaccatccgcggcattggcgcggtgcgcgcactgcagatgatcaagaagcacggcagcattgagggcatgctcaaggagctggaccccgccaagtacccggtgccggagccattcccgcacaaggagagccatgagttctttaagaaccccgaggtcacgccatctgcggagatcccgccgctcaagtggacggcgccggatgaggaggggctcgtgcagttcctggtgaacgagaagcagttcaacgagcagcgcgtgcgcaacgcggtggggcgaatcaaggccaacaagaccaaggccaaccagggccgcctcgagtccttctttacctcgctgcccaagcccgccacagcggacaaggccaagcccaaggaggacgacaagaagcggaaagcgggcgcagcggcgggcggcaaggacgccaagggcggcgcggcggccaagaaaggaaagttcggcgtgggtggcggcaagaagtga

SEQ ID NO: 689 - protein, 396 aa, Chlamydomonas reinhardtii
MGIHGLTKLLGDNAPGCIKETKFENLFGRKVAVDASMHIYQFMVVVGRQGDQLLTNEAGEITSHLQGMFFRTAKMLEAGIKPVYVFDGKPPQLKQDQLAQRTERRADANEALEKAKEAGDQEAIEKYSKRSVRVTREHNDECKRLLRLMGVPVVEAPTEAEAQCAEMAKSGLVYGLATEDMDALTFGAPRVIRHLMAPSSQNVPVQEFDREVALRELELTDDQFIDLCILMGCDYCGTIRGIGAVRALQMIKKHGSIEGMLKELDPAKYPVPEPFPHKESHEFFKNPEVTPSAEIPPLKWTAPDEEGLVQFLVNEKQFNEQRVRNAVGRIKANKTKANQGRLESFFTSLPKPATADKAKPKEDDKKRKAGAAAGGKDAKGGAAAKKGKFGVGGGKK

SEQ ID NO: 690 - DNA, 1155 bp, Chlorella vulgaris
atggggatcaagaatctgacgaaattgctgggtgatcatgctccgggatgctgtaaggagcagaaggtcgaaaactattttggccgaaaagtagctgttgatgcgtccatgcacatctaccaatttctggttgtggtgggaaggactggcgaccaaaccctgaccagcgaatcaggcgatgtcaccagtcacctgcagggaatgttcttcaggacagcaaaaatgttggaagtcggcatgaagccagtgtatgtctttgatgggaagccaccggccttgaaaaaggaggagctgtctaggagggtggagaggaggggtgatgcaacggatttgctcacagaagccaaggagactggtgcagatgcagacattgagaaatacagcaagaggacagtgagagtgacgccgcagcacaatgaggaatgccgcagactgctgcgcctgatgggagtgcctgtcgtggaagcaccttcagaagcagaggcgcagtgcgcgcagatgtgcaaggaagggctggtgtacgggattgcatcagaagacatggattcattgacatttgcaactcccaagctcatacggaatctcatgaagcctcagacgcagaatgtgccaatcaacgaatacgattatgacaaggtgcttgagggcttgaatctgaccagcgatcagtttgtggacctgtgcattctgtgtggatgcgactactgtggcacgatcaagggcattggaggcgtgactgctctgaagctcatccagaagcacaagcggctggaggatgtgctggccagcatggagggcggccgctacgagattccagaccccttccccttcgaggaagcacgccgcctgttcaaggagccggatgtcctgaagggagacagcatgcctcaactgaagtggacaacggctgatgaggagggcctggtgcagtttctggttggggacaagagcttcaacgaggacagagtcaggaaagcggtgcagcgcgtgaatgcggcaaagtcaaagtccacacaaggacgattggagagcttcttcggccccgtaagcatcaagacttccgacacagggaagcgcaaggaaccagccacaggaaagggcaagggtcaagcggcgaagaagggcaagtcaggtgtgggcgtcaagaagaagtga

SEQ ID NO: 691 - protein, 384 aa, Chlorella vulgaris
MGIKNLTKLLGDHAPGCCKEQKVENYFGRKVAVDASMHIYQFLVVVGRTGDQTLTSESGDVTSHLQGMFFRTAKMLEVGMKPVYVFDGKPPALKKEELSRRVERRGDATDLLTEAKETGADADIEKYSKRTVRVTPQHNEECRRLLRLMGVPVVEAPSEAEAQCAQMCKEGLVYGIASEDMDSLTFATPKLIRNLMKPQTQNVPINEYDYDKVLEGLNLTSDQFVDLCILCGCDYCGTIKGIGGVTALKLIQKHKRLEDVLASMEGGRYEIPDPFPFEEARRLFKEPDVLKGDSMPQLKWTTADEEGLVQFLVGDKSFNEDRVRKAVQRVNAAKSKSTQGRLESFFGPVSIKTSDTGKRKEPATGKGKGQAAKKGKSGVGVKKK

SEQ ID NO: 692 - DNA, 1170 bp, Chlorella sp.
atgggcatccagggcctcaccaagctgctgggtgatgctgccccagggtgcatgaaggagcagaagtttgaaaactactttggacgcaagattgcggtggacgcatccatgcacatctacgccttcctggtagtggtgggccgccagggcgaccagatgctgacgagtgagacgggcgaggtgaccagccacctgcagggcatgttcttccgcacagtgcgcatgctggaggcggggatgaagcctgtgtttgtgtttgagggcaaggctccggagctgaagcgcgaggagctggccaagcgcagcaaccggcgtgaggacgccaacaccgagctggaggcggcaaaggaggcgggaaacgcggaggatgtagagaagtacagcaagcgaacggtgcgcgtgacgcgggaacacaacgaggagtgcaagcgcctgctgcgcctcatgggtgtgccggtgctggaggcgccaagcgaggcagaggcgcagtgcgcacagctgtgcaaggacgggctggtgtatggcatctctaccgaggacatggattccctcacctttggcacccccaagctcatccgccacctcatggcaccctccagccagaagcctctggccatggagtttgaccacgaactggtgctcaaggagctggagctgaccgaggatcagttcatcgacctgtgcatcttatgcggttgcgactacacagccaagatcagcggcatcggcgcggtgcgcgcgctgagcctgatcaagaagcacggcagcattgagggggtgctggcggcgctggactccaagaagtatcagataccggagcccttcccctaccaggaggcgcgccgcctgttcaaggagccggacgtggtcaagggcgaccagatcccgcaactcaagtggacctcgcccgacacagagggcctgatcgacttcctggtgaaggaaaagacatttgcggaggaccgcatccgcaaggcggtagaacgcatcaatgcggctaagggcaaggccagccagggccggttagagagcttcttcggccccgccaaggtggtcagcagcacgatgggcaagcgcaaggaggtgcccgtggcggccaagggcaagaagggcagcagcggcgcggctcccaagaagggcaagctgggcggcatgggcaagaagaagtag

SEQ ID NO: 693 - protein, 389 aa, Chlorella sp.
MGIQGLTKLLGDAAPGCMKEQKFENYFGRKIAVDASMHIYAFLVVVGRQGDQMLTSETGEVTSHLQGMFFRTVRMLEAGMKPVFVFEGKAPELKREELAKRSNRREDANTELEAAKEAGNAEDVEKYSKRTVRVTREHNEECKRLLRLMGVPVLEAPSEAEAQCAQLCKDGLVYGISTEDMDSLTFGTPKLIRHLMAPSSQKPLAMEFDHELVLKELELTEDQFIDLCILCGCDYTAKISGIGAVRALSLIKKHGSIEGVLAALDSKKYQIPEPFPYQEARRLFKEPDVVKGDQIPQLKWTSPDTEGLIDFLVKEKTFAEDRIRKAVERINAAKGKASQGRLESFFGPAKVVSSTMGKRKEVPVAAKGKKGSSGAAPKKGKLGGMGKKK

SEQ ID NO: 694 - DNA, 1158 bp, Drosophila melanogaster
atgggaattttgggcttatctaagctcattgccgatctggcgccacaggcgattcgcgaaagtgagatgaagcattttttcggtcgcaaggtagcaatcgatgctagtatgtgcctgtaccagttcctcatcgccgtgcgctccgaaggcgcccagttggccaccgtaaatggtgatcccacgtcccacttaatgggcatgttctaccgcaccatccgattgctggacaacggaatcaagccggtatatgtcttcgacggaaagccaccagatctcaagtccggtgagctggcgaagcgcgccgagcggcgggaggaagcggagaaggcactgaaggcggccaccgatgcgggagatgatgccggtatcgaaaagtttaatcgccgattggtccgggtaacgaaggagcacgccaaagaggccaaggaactgctcacactaatgggtgtgccctatgttgatgcaccgtgcgaagcggaggcccagtgtgccgctctggtgaaagctggaaaggtttatgccaccgccacggaggatatggatgccctcacattcggatctacaaaactgttgagataccttacctacagcgaggcacgaaagatgcccgtcaaggagttcagctacgacaagctgttggaaggtctggccattaacaatcgagagttcattgatctatgtattctgctgggttgcgattactgtgagagcatcaagggtattggacccaagcgagcgatcgaactgatcaacacctatcgggatatagagactattctggataacctggactctagcaaatacaccgtgcccgagaactggaactacaaggtggcgcgggaactcttcatcgaaccggaggtagctgatgccgactccatagatctcaaatgggtcgagccggatgaggagggccttgtcaagtttctctgcggcgaccggcagttcaacgaagagcgcgttcgcaacggtgccaaaaagctgatgaaatccaagcaggcccagactcaggtgagactcgatagcttctttaagacactgcccagcactccgaatgccacaaacgctgcaaaacggaaggccgaggaagcaaagaagagcgccaataacaaaaaggccaagaccagcggcggtggacgaggccggcgacccaagtag

SEQ ID NO: 695 - protein, 385 aa, Drosophila melanogaster
MGILGLSKLIADLAPQAIRESEMKHFFGRKVAIDASMCLYQFLIAVRSEGAQLATVNGDPTSHLMGMFYRTIRLLDNGIKPVYVFDGKPPDLKSGELAKRAERREEAEKALKAATDAGDDAGIEKFNRRLVRVTKEHAKEAKELLTLMGVPYVDAPCEAEAQCAALVKAGKVYATATEDMDALTFGSTKLLRYLTYSEARKMPVKEFSYDKLLEGLAINNREFIDLCILLGCDYCESIKGIGPKRAIELINTYRDIETILDNLDSSKYTVPENWNYKVARELFIEPEVADADSIDLKWVEPDEEGLVKFLCGDRQFNEERVRNGAKKLMKSKQAQTQVRLDSFFKTLPSTPNATNAAKRKAEEAKKSANNKKAKTSGGGRGRRPK

SEQ ID NO: 696 - DNA, 1149 bp, Glycine max
atgggtattaagggtttaacaaagcttttagcggacaatgccccgaagtccatgaaggagaacaaattcgagagctactttggtcgcaagatcgctattgacgctagcatgagcatttaccagttccttattgtcgtgggaagaagtggaactgaaatgctcactaatgaggctggtgaagttaccagtcatttgcaagggatgttttcgcggacaatcagacttctagaagctgggataaaacctgtatatgtttttgatgggaagccacctgatttgaagaaacaagagcttgccaaacgttactccaagagagctgaggctactgaagatttgtcagaagccttagagaccgccaataaggaagacattgaaaaattcagtaaacggacagtgaaggttacaaagcagcataatgacgactgcaaaagacttttaaggctcatgggagtgcccgttgttgaggcaccctcagaagcagaggctcagtgtgctgctctttgtaaagctggaaaggtttatggtgtggcttctgaagacatggattccttaacatttggagctcctaaatttcttcgccacctaatggatccaagctcaaaaaaaattccagtgatggaattcgaagttgcgaagattttggaggagctaaatatgaccatggaccaatttattgacttatgcattctttctggctgtgattattgtgacagcattcgagggattgggggactgacagctttgaaactcatacgtcaacatggctctattgaaaatatactggagaacctaaacaaagagaggtaccagatacccgataattggccatatcaggaggctcggcggctttttaaagaaccattggtcataactgatgaaaaggaacttgatattaagtggtcttctccagatgaagaagggttaataacatttctggtaaatgagaatggcttcaacagggatagagtgactaaggcaatagaaaaaattaaagtggcaaagaacaagtcatcacaaggccgattggaatcattttttaagccaacagcaaatccatctgtacctattaaacgcaaggaaacaccagtgaataatgctaaagaaactaacaaaaagaccaaggctggtggtggtaagaagaagaaatag

SEQ ID NO: 697 - protein, 382 aa, Glycine max
MGIKGLTKLLADNAPKSMKENKFESYFGRKIAIDASMSIYQFLIVVGRSGTEMLTNEAGEVTSHLQGMFSRTIRLLEAGIKPVYVFDGKPPDLKKQELAKRYSKRAEATEDLSEALETANKEDIEKFSKRTVKVTKQHNDDCKRLLRLMGVPVVEAPSEAEAQCAALCKAGKVYGVASEDMDSLTFGAPKFLRHLMDPSSKKIPVMEFEVAKILEELNMTMDQFIDLCILSGCDYCDSIRGIGGLTALKLIRQHGSIENILENLNKERYQIPDNWPYQEARRLFKEPLVITDEKELDIKWSSPDEEGLITFLVNENGFNRDRVTKAIEKIKVAKNKSSQGRLESFFKPTANPSVPIKRKETPVNNAKETNKKTKAGGGKKKK

SEQ ID NO: 698 - DNA, 1149 bp, Glycine max
atgggtattaagggtttaacaaagcttttggcggacaatgccccgaagtccatgaaggagaacaaattcgagagctacttcggtcgcaagatcgccattgacgctagcatgagcatttaccagttccttattgttgtgggaagaagcggaactgaaatgctcactaatgaggctggtgaagttaccagtcatttgcaagggatgttttcgcggacaatcagacttctagaagctgggataaaaccagtatatgtttttgatgggaagccaccagatttgaagaaacaagagctggccaaacgttactccaagagagctgaggctactgaagatttgtcagaagccttagagactgccaataaggaagacattgaaaaattcagtaaacgtacagtgaaggtgacaaaacagcataatgacgactgcaaaagacttttaaggctcatgggagtgcctgttgttgaggcaccctcagaagcagaggctcagtgtgctgccctttgcaaagctggaaaggtttatgctgtggcttctgaagacatggattccttaacatttggatctcctaaatttcttcgccacctaatggatccaagctcaaaaaaaattccagtgatggaattcgaagttgcaaagattttggaggagctaaatatgaccatggaccaatttattgacttatgcattctttctggctgtgattattgtgacagcattcgagggattgggggactgacagctttgaaactcatacgtcaacatggctctattgaaaatatactggagaacctaaacaaagagaggtaccagataccagataattggccatatcaggaggctcggcggctttttaaagaaccaatggtcataactgatgaaaaggaacttgatattaagtggtcttctccagatgaagaagggttaataacatttctggttaatgagaatggtttcaacagtgatagagtgactaaggcaatagaaaaaattaaagtggcaaagaacaagtcatcacaaggccgattggaatcattttttaagccaacagtaaatccatctgtacctatcaaacgcaaggaaacaccagtgaataatgctaaagaaactaacaaaaagaccaaggctggtggtggtaagaagaagaaatag

SEQ ID NO: 699 - protein, 382 aa, Glycine max
MGIKGLTKLLADNAPKSMKENKFESYFGRKIAIDASMSIYQFLIVVGRSGTEMLTNEAGEVTSHLQGMFSRTIRLLEAGIKPVYVFDGKPPDLKKQELAKRYSKRAEATEDLSEALETANKEDIEKFSKRTVKVTKQHNDDCKRLLRLMGVPVVEAPSEAEAQCAALCKAGKVYAVASEDMDSLTFGSPKFLRHLMDPSSKKIPVMEFEVAKILEELNMTMDQFIDLCILSGCDYCDSIRGIGGLTALKLIRQHGSIENILENLNKERYQIPDNWPYQEARRLFKEPMVITDEKELDIKWSSPDEEGLITFLVNENGFNSDRVTKAIEKIKVAKNKSSQGRLESFFKPTVNPSVPIKRKETPVNNAKETNKKTKAGGGKKKK

SEQ ID NO: 700 - DNA, 1143 bp, Homo sapiens
atgggaattcaaggcctggccaaactaattgctgatgtggcccccagtgccatccgggagaatgacatcaagagctactttggccgtaaggtggccattgatgcctctatgagcatttatcagttcctgattgctgttcgccagggtggggatgtgctgcagaatgaggagggtgagaccaccagccacctgatgggcatgttctaccgcaccattcgcatgatggagaacggcatcaagcccgtgtatgtctttgatggcaagccgccacagctcaagtcaggcgagctggccaaacgcagtgagcggcgggctgaggcagagaagcagctgcagcaggctcaggctgctggggccgagcaggaggtggaaaaattcactaagcggctggtgaaggtcactaagcagcacaatgatgagtgcaaacatctgctgagcctcatgggcatcccttatcttgatgcacccagtgaggcagaggccagctgtgctgccctggtgaaggctggcaaagtctatgctgcggctaccgaggacatggactgcctcaccttcggcagccctgtgctaatgcgacacctgactgccagtgaagccaaaaagctgccaatccaggaattccacctgagccggattctgcaggagctgggcctgaaccaggaacagtttgtggatctgtgcatcctgctaggcagtgactactgtgagagtatccggggtattgggcccaagcgggctgtggacctcatccagaagcacaagagcatcgaggagatcgtgcggcgacttgaccccaacaagtaccctgtgccagaaaattggctccacaaggaggctcaccagctcttcttggaacctgaggtgctggacccagagtctgtggagctgaagtggagcgagccaaatgaagaagagctgatcaagttcatgtgtggtgaaaagcagttctctgaggagcgaatccgcagtggggtcaagaggctgagtaagagccgccaaggcagcacccagggccgcctggatgatttcttcaaggtgaccggctcactctcttcagctaagcgcaaggagccagaacccaagggatccactaagaagaaggcaaagactggggcagcagggaagtttaaaaggggaaaataa

SEQ ID NO: 701 - protein, 380 aa, Homo sapiens
MGIQGLAKLIADVAPSAIRENDIKSYFGRKVAIDASMSIYQFLIAVRQGGDVLQNEEGETTSHLMGMFYRTIRMMENGIKPVYVFDGKPPQLKSGELAKRSERRAEAEKQLQQAQAAGAEQEVEKFTKRLVKVTKQHNDECKHLLSLMGIPYLDAPSEAEASCAALVKAGKVYAAATEDMDCLTFGSPVLMRHLTASEAKKLPIQEFHLSRILQELGLNQEQFVDLCILLGSDYCESIRGIGPKRAVDLIQKHKSIEEIVRRLDPNKYPVPENWLHKEAHQLFLEPEVLDPESVELKWSEPNEEELIKFMCGEKQFSEERIRSGVKRLSKSRQGSTQGRLDDFFKVTGSLSSAKRKEPEPKGSTKKKAKTGAAGKFKRGK

SEQ ID NO: 702 - DNA, 1143 bp, Hordeum vulgare
atgggagtcaagggtttgacgaagctgctggcggacaacgcgcccaagtcgatgagggagcagaagttcgagagctacttcggccgccgcatcgccgtcgacgccagcatgagcatctaccagttccttattgtagttggaaggacagggatggaaacccttacaaacgaagccggtgatgtcaccagtcatttgcaaggcatgttcagccggacaataaggttgctcgaggcaggaattaaaccagtatatgtttttgatggcaagcctcctgaaatgaagaaggacgagcttttaaaaagacacgcaaagaggaatgaagcaacagaagagctgacgaaggcagtagaggcaggagatacggatgcaattgaaaaattcagcaagaggactgtaaaggtcacgaagcagcacaatgatgattgtaagcgtctactaagactgatgggtgttcctgttgtagaggctccttgtgaagcagaatcacaatgtgctgccctttgcaagagtgacaaggtgtatgctgttgcatcagaagatatggactcacttacttttggagctccacggtttgttcgtcatttgatggatccaagttcgaggaaaatacctgtaatggaatttgaagttgcgaaaattctagaggagcttgaatttaccatggaccagttcattgacttgtgcatcctctgtggatgtgactactgtgatagcattaaaggcatcggtggtcttacagctctgaagctcattcgtcagcatgggtctatcgagggcatcctggaaaatattaataaagacaaatatcaaattcctgaggactggccttatcaagaagctcggcgcatgttcaaggaacccagtgtaacactggatattcccgagctcaaatggaccgcgcctgatgaggaggggctcgtgaattttctggtgaaagaaaacggcttcagtcaagatcgtgtgactaaggccatagagaagattaaatcggcaaagaataaatcatcccaaggaaggcttgagtcatttttcaagccaactgttagcacatcagtgccactgaagcggaaggaaacttcagagaaaccagccagtgcagctgctggcaaaaagacgaagtcaacccgtggaaggaagaaataa

SEQ ID NO: 703 - protein, 380 aa, Hordeum vulgare
MGVKGLTKLLADNAPKSMREQKFESYFGRRIAVDASMSIYQFLIVVGRTGMETLTNEAGDVTSHLQGMFSRTIRLLEAGIKPVYVFDGKPPEMKKDELLKRHAKRNEATEELTKAVEAGDTDAIEKFSKRTVKVTKQHNDDCKRLLRLMGVPVVEAPCEAESQCAALCKSDKVYAVASEDMDSLTFGAPRFVRHLMDPSSRKIPVMEFEVAKILEELEFTMDQFIDLCILCGCDYCDSIKGIGGLTALKLIRQHGSIEGILENINKDKYQIPEDWPYQEARRMFKEPSVTLDIPELKWTAPDEEGLVNFLVKENGFSQDRVTKAIEKIKSAKNKSSQGRLESFFKPTVSTSVPLKRKETSEKPASAAAGKKTKSTRGRKK

SEQ ID NO: 704 - DNA, 1155 bp, Medicago truncatula
atgggtattaagggtttaacgaagcttttagctgataatgctcccaaatcaatgaaggagaacaaattcgaatcttactttgggcgtaagattgctgttgatgctagtatgagcatttaccagtttcttattgttgtggggagaagtggaactgaaatgttgactaatgaagctggtgaagtaactagtcatttgcaaggaatgtttgcgcggacaatcagacttctagaagccgagatgaagccagtatatgtttttgatgggaagccaccggagatgaagaatcaagagctgaaaaaacgtctctcaaagagagctgaggctaccgcgggtttgacagaagctctagaggctgacaataaggaagatattgaaaaattcagtaaacggacagtgaaggtgacaaagcaacataatgacgactgcaaaagacttttgagactcatgggagtgcccgttgttgaggcaccctcagaagcagaggctcagtgtgctgcactttgcaaagctggaaaggtgtatgctgtggcttctgaagacatggattccttaacgtttggagctcctaagtttcttcgccatctaatggatcctagttcaaagaagattccagtaatggaatttgacgttgcaaagattttggaggagctagatttgaccatggaccaatttattgacttatgtatactttccggatgtgattactgtgacaacattcgaggtattggggggatgacagctctgaagctcatacgccaacacggctctattgaaaaaatactggaaaacataagcaaagagaggtaccaggtaccagatgattggccatatcaggaggctcgacgactttttaaagagccagaggtctcaactgatgatgaagtacttaatcttaagtggtctcctccagatgaagaagggttaataacatttctagtaaatgagaatgggttcaacagtgatagggtgacaaaggcaatagaaaaaattaaagcggcaaagaacaagtcatcacaaggccgattggaatcattttttaagccaactgcgaatccatctgtacctatcaaacggaaggaaactccagtgaatgatgctaaagctaaagggagtaacaagaaaactaaggtgggtggcggtaagaagaaaaaatag

SEQ ID NO: 705 - protein, 384 aa, Medicago truncatula
MGIKGLTKLLADNAPKSMKENKFESYFGRKIAVDASMSIYQFLIVVGRSGTEMLTNEAGEVTSHLQGMFARTIRLLEAEMKPVYVFDGKPPEMKNQELKKRLSKRAEATAGLTEALEADNKEDIEKFSKRTVKVTKQHNDDCKRLLRLMGVPVVEAPSEAEAQCAALCKAGKVYAVASEDMDSLTFGAPKFLRHLMDPSSKKIPVMEFDVAKILEELDLTMDQFIDLCILSGCDYCDNIRGIGGMTALKLIRQHGSIEKILENISKERYQVPDDWPYQEARRLFKEPEVSTDDEVLNLKWSPPDEEGLITFLVNENGFNSDRVTKAIEKIKAAKNKSSQGRLESFFKPTANPSVPIKRKETPVNDAKAKGSNKKTKVGGGKKKK

SEQ ID NO: 706 - DNA, 1170 bp, Ostreococcus lucimarinus
atgggaatcaagggcctgacggcgctgatgcgagacaacgcccccggggcgatcaaggagcaaaagttcgagtcctacctcgaccggcgcgtcgcgatcgacgcgtcgatgcacatttatcaattcatgatggtggtggggagacagggcgaacaacagctgacgaatgaggcgggagaggtgacgtcgcacttgcaggggatgttgaatcgaacgtgccgaatgctcgaggcgggaataaagccgatttacgtgttcgatgggaagccgccggtgatgaagggaggagagctggcgaagcgcaaggacaagcgagaagaggcggaggcggcgttgaaggcggcgagagaggcgggaaatcaagaagaggtggagaaactgtccaaaagaacggtgcgagtgagcaagcaacacagtcaagaggtgatgaaactcgcgtcgttgctcggagtgcccgtgttcgaggcgccgtgcgaagccgaggcgtcgtgcgcggcgatgtgcaaggcgggactggtgtgggcggtggcgacggaggatatggatacactcacgttcgccgcgccgcggttggcaagaaatttgatggcacccaagtctcaggacaagccggtgctggagtttgactacgacaaagttctagccggtctcgggctcacgcccgagcaattcatcgacatgtgcatcttgtgcgggtgcgactattgcgacaccattcgcgggatcggtccgaagacggcgttgaagcttatcaaagaacacggttccatcgaaaagattctcgaagagatcgacactgagaagtatcctccgcctcaggattgggattttgccggcgctcgtgagttgttcaaaaatcccgaagtcatggacacgacgggcatcgcattgagttggaaggcgccaaacgaggaaggattgattgactttttggtcaaggaaaagcaatttaacgaggaacgcgtgcgcgccgtgtgcgccaaagtcaagaaggcgcgccaaggtaaagcgtcgcaaaaccgcctcgagagcttcttcggcccgccgaccataatctccagtaccatcggcaagcgcaaggttgaagaaaagaagggtaaaaacggcaaggctggtctcgcgaacaaaaagtctaaaggcgtcagtggcttcagacgatcgaagaactga

SEQ ID NO: 707 - protein, 389 aa, Ostreococcus lucimarinus
MGIKGLTALMRDNAPGAIKEQKFESYLDRRVAIDASMHIYQFMMVVGRQGEQQLTNEAGEVTSHLQGMLNRTCRMLEAGIKPIYVFDGKPPVMKGGELAKRKDKREEAEAALKAAREAGNQEEVEKLSKRTVRVSKQHSQEVMKLASLLGVPVFEAPCEAEASCAAMCKAGLVWAVATEDMDTLTFAAPRLARNLMAPKSQDKPVLEFDYDKVLAGLGLTPEQFIDMCILCGCDYCDTIRGIGPKTALKLIKEHGSIEKILEEIDTEKYPPPQDWDFAGARELFKNPEVMDTTGIALSWKAPNEEGLIDFLVKEKQFNEERVRAVCAKVKKARQGKASQNRLESFFGPPTIISSTIGKRKVEEKKGKNGKAGLANKKSKGVSGFRRSKN

SEQ ID NO: 708 - DNA, 1176 bp, Ostreococcus sp. RCC809
atggggatcaagggcctgacgcagttgttgcaagataacgccccgggggcgatgcgagagcaaaagtttgattcgtacctcgatcgacgggtcgccgtcgacgcgtcgatgcacatctatcagtttatgattgcggtgggacgagagggcgagcgtcagctgacgagcgaggcgggagaggtgacgtcgcacctggtgggaatgatgaaccgaacggcgaggatgctggaggcggggataaaaccgatctatgtgttcgatgggaaaccgccgacgatgaagggtggggaattggcgaagcggaaggacaagagagaggaagccgaggcggcgctcaaggcggcgcgcgaggcgggagaccaagcggagattgaaaaattagcgaaacgcacggtgagagtgagcaaggaacacagtaaagaggtcatgagattggcgactttgctcggagtccccgtctacgaggctccgtgcgaggcggaggcgtcgtgcgcggccctgtgcaaagccgggttggtgtgggcggtggcgacggaggatatggatacgctcacgttcgccgcgccgcgcatggcgagaaacttgatggcgcccaagtcggcagaaaagccagtgttagaattcgactacgagaaagtgttggccggacttggactgacagctgatgaattcattgatttgtgcatcttgtgcggctgcgactacaccgacaccattcgcggtatcggtccgaagactgctttgaaactcgtaaaggagcacaaaaccatcgagaacattctcgaggcgatcgatactgaaaagcaccagccgccgaaagattggaactttcaaggtgcgcgcgaactgttcaaaaatccagaagtgatggacacgaacggcatcaaactcgcgtggaaagcgccggatgaagaaggactcgtcaagttcttggtcgaagaaaagcagttcaatgaggaccgtgtcagaggagtatgcgcgcgcgtgaaaaaggcacgtactggtaaggcttcgcaaaaccgcttggaaagcttcttcggtccaccaaaaatcatctcaagcacgattggtaagcgcaaggtggaagaaaccaagggcaagaatggtaaaggtaaggcgggtctcgcgaataagaaatctaagggtgtgagtggatacaagaaatccaagcaatga

SEQ ID NO: 709 - protein, 391 aa, Ostreococcus sp. RCC809
MGIKGLTQLLQDNAPGAMREQKFDSYLDRRVAVDASMHIYQFMIAVGREGERQLTSEAGEVTSHLVGMMNRTARMLEAGIKPIYVFDGKPPTMKGGELAKRKDKREEAEAALKAAREAGDQAEIEKLAKRTVRVSKEHSKEVMRLATLLGVPVYEAPCEAEASCAALCKAGLVWAVATEDMDTLTFAAPRMARNLMAPKSAEKPVLEFDYEKVLAGLGLTADEFIDLCILCGCDYTDTIRGIGPKTALKLVKEHKTIENILEAIDTEKHQPPKDWNFQGARELFKNPEVMDTNGIKLAWKAPDEEGLVKFLVEEKQFNEDRVRGVCARVKKARTGKASQNRLESFFGPPKIISSTIGKRKVEETKGKNGKGKAGLANKKSKGVSGYKKSKQ

SEQ ID NO: 710 - DNA, 1239 bp, Oryza sativa
atgggcatcaagggtttgacgaagctgctggcggagcacgcgccgggggcggcggtgaggaggcgggtggaggattaccgcggccgcgtcgtcgccatagacaccagcctcagcatctaccagttcctcattgtggtaggaaggaaaggaacagaagttctgaccaatgaggctggtgaagtcacaagtcatctgcagggcatgttgaaccgaactgttaggattctagaagcaggaataaaacctgtttttgtgtttgatggtgagccacctgacatgaagaaaaaggaactggcaaaaaggtctttgaagagagatggttcttccgaagatctaaatagagctattgaggttggagatgaggatttaattgaaaaatttagcaaaaggactgtaaaggtcacaaaaaagcacaatgaagactgtaagaggctgttaagcttgatgggtgtccctgtagttcaggcaccaggggaggcagaagcacagtgcgcagcactctgtgaaaatcacaaggtctttgctatagcttcggaggatatggactctctaacttttggtgctagaaggtttcttcgccatttaaccgacctgagttttaagagatctcctgtaacagaattcgaagtgtcaaaggttttggaggaacttggactcacaatggatcagttcattgatttgtgtatccttagtggctgtgactactgcgagaatattagaggtattgggggacagagagctttgaaacttattcgtcagcatggttatatagaagaagtagtgcaaaatcttagccagacaaggtatagtgtcccagaagactggccttaccaggaagttcgggcattgtttaaggaacctaacgtttgtacagatattccagacttcctgtggaccccaccagatgaggagggccttataaactttttggcagccgaaaataatttcagtcctgatcgagtagtaaagtctgtagaaaagataaaggctgctaatgataaattttcccttgggcgagggaagcttttggcaccagtagcgaacttaacaggatctacatcaactgcagggaaggaacccaaatgtatcctgggtggtccagggcaagtcatgaaggctaggtcacctctacaagtgtgcaagagctcaagcttgaacttcatacatgacaattcaaaagcgttcatgctgggcaggcgatcaggatttctcagaatatctacatatgcttccatctga

SEQ ID NO: 711 - protein, 412 aa, Oryza sativa
MGIKGLTKLLAEHAPGAAVRRRVEDYRGRVVAIDTSLSIYQFLIVVGRKGTEVLTNEAGEVTSHLQGMLNRTVRILEAGIKPVFVFDGEPPDMKKKELAKRSLKRDGSSEDLNRAIEVGDEDLIEKFSKRTVKVTKKHNEDCKRLLSLMGVPVVQAPGEAEAQCAALCENHKVFAIASEDMDSLTFGARRFLRHLTDLSFKRSPVTEFEVSKVLEELGLTMDQFIDLCILSGCDYCENIRGIGGQRALKLIRQHGYIEEVVQNLSQTRYSVPEDWPYQEVRALFKEPNVCTDIPDFLWTPPDEEGLINFLAAENNFSPDRVVKSVEKIKAANDKFSLGRGKLLAPVANLTGSTSTAGKEPKCILGGPGQVMKARSPLQVCKSSSLNFIHDNSKAFMLGRRSGFLRISTYASI

SEQ ID NO: 712 - DNA, 1143 bp, Oryza sativa
atgggcatcaagggtttgacgaagcttttggcggacaatgcgcccaaggcgatgaaggagcagaagttcgagagctacttcggccggcgcattgccgtcgacgccagcatgagcatctaccagttcctcattgtagttggaaggacggggatggaaaccctcacgaacgaggccggtgaagtcaccagtcatttgcaaggtatgttcaaccggacaataaggttgctggaggcaggaatcaagccagtatatgtttttgacggcaagcctcctgatctgaagaaacaagagctcgcaaaaaggtactcgaagagggaggatgccaccaaagaactaacagaggcagtagaggaaggagataaagacgcaattgaaaaattcagcaagagaactgtgaaggtcacgaagcagcacaatgaagaatgtaaacgactattaagacttatgggggttcctgttgtagaggcgccatgtgaagcagaagcagaatgtgctgcactttgcataaatgatatggtttatgcagttgcatcagaagatatggactctcttacttttggagctccacggtttcttcgtcatttgatggatccaagttccaagaaaattccagttatggaatttgaagtcgcgaaagttttggaggagcttgaactcactatggaccaattcattgacttgtgcatcctatctggatgtgactattgtgatagcattaaaggtattggaggtcaaacagctctgaaacttattcgtcaacatgggtccatagaaagcattctggaaaacataaataaagacagatatcagattcctgaggactggccttatcaagaagctcgacgcttgttcaaggaacccaatgttacattggatattcctgagctgaaatggaatgctcccgatgaggaaggtcttgtagagtttctggtgaaagaaaatggtttcaaccaagatagagtgacaaaggccatagagaagattaaatttgccaagaacaaatcttcccaaggaaggctcgaatccttcttcaagccagttgttagcacatcagtgcctctgaaaagaaaggacacttcagaaaaaccaaccaaagcagtcgctaacaagaaaacaaagggagccggcggaaagaagaaataa

SEQ ID NO: 713 - protein, 380 aa, Oryza sativa
MGIKGLTKLLADNAPKAMKEQKFESYFGRRIAVDASMSIYQFLIVVGRTGMETLTNEAGEVTSHLQGMFNRTIRLLEAGIKPVYVFDGKPPDLKKQELAKRYSKREDATKELTEAVEEGDKDAIEKFSKRTVKVTKQHNEECKRLLRLMGVPVVEAPCEAEAECAALCINDMVYAVASEDMDSLTFGAPRFLRHLMDPSSKKIPVMEFEVAKVLEELELTMDQFIDLCILSGCDYCDSIKGIGGQTALKLIRQHGSIESILENINKDRYQIPEDWPYQEARRLFKEPNVTLDIPELKWNAPDEEGLVEFLVKENGFNQDRVTKAIEKIKFAKNKSSQGRLESFFKPVVSTSVPLKRKDTSEKPTKAVANKKTKGAGGKKK

SEQ ID NO: 714 - DNA, 1170 bp, Ostreococcus taurii
atgggaatcaaaggtttgaccgcgttgctctcggagaacgcccccggggcgatgcgagagcaaaaattcaccagttatctcgaccgacgcgtcgccatcgacgcctcgatgcacatctatcaattcatgatcgccgtcggacgcacgggcgagcagacgctgacgaacgaggcgggagaggtgacgtcacacttacaggggatgttgatgcgcacgtcgaggatgctcgaggcggggatcaaacccgtgtacgtgttcgacgggaagccaccgacgatgaagggaggagagctggcgaaacgcaaggacaagagggaggaagccgaagcggcgctcaaagcggcgagagaggcgggtaaccaggaagaggtggagaaattatccaagagaacggtgcgagtgagcaaagaacagagcatggaggtcatgaagctcgcgcaacttttggggattcccgcgtttgaggcgccgtgcgaagccgaggcgacgtgcgccgcgatgtgcaaagctggattggtctgggccgtgggcacggaggacatggacaccttgacgttcgccgcgccgagagtggcaagaaatttgatggcgccgaaatccgccgagaaacctgtgctcgaattcgactacgaaaagaccatcgccggactcgggctcaccgcggaccagttcattgacttgtgcatcttgtgcggatgcgactataccgataccattcgaggcgtcggtccgaagactgctttgaaactcatcaaagaacatggctcgattgagaaaatcttggaggcgattgatactgagaagtatccccctccgaaggattgggagtttgccggggcgcgagaactgttcaaaaatcccgaagtgatggatgtgagcgggatcaacctctcttggaaggcgccagatgaggaaggactcgtcgaatttttggtcaaggagaaacaattccaggaggatcgcgtgagaggtgtgtgcgcgaggatcagaaaggcccggcagggcgccgcgtcgcagaaccgtttggaaagcttcttcggaccgccaaagatcatttccagcactatcggcaagcggaaggttgaagaaaccaagagcggtaagggcagcaaggctggattaaacaagaaatccaagggtgtgagcggttacaaatccaagaagacttag

SEQ ID NO: 715 - protein, 389 aa, Ostreococcus taurii
MGIKGLTALLSENAPGAMREQKFTSYLDRRVAIDASMHIYQFMIAVGRTGEQTLTNEAGEVTSHLQGMLMRTSRMLEAGIKPVYVFDGKPPTMKGGELAKRKDKREEAEAALKAAREAGNQEEVEKLSKRTVRVSKEQSMEVMKLAQLLGIPAFEAPCEAEATCAAMCKAGLVWAVGTEDMDTLTFAAPRVARNLMAPKSAEKPVLEFDYEKTIAGLGLTADQFIDLCILCGCDYTDTIRGVGPKTALKLIKEHGSIEKILEAIDTEKYPPPKDWEFAGARELFKNPEVMDVSGINLSWKAPDEEGLVEFLVKEKQFQEDRVRGVCARIRKARQGAASQNRLESFFGPPKIISSTIGKRKVEETKSGKGSKAGLNKKSKGVSGYKSKKT

SEQ ID NO: 716 - DNA, 1185 bp, Physcomitrella patens
atgggtatcaagggattaaccaagctgattgcggacaatgctcatggcgcagtgaaggaacaaaagtttgagaattattttggtcgaaaaattgccatcgatgctagcatgagcatttatcagtttctgatagtcgtagggcgcagtggaagcgaattactcacgaatgacgcgggagaagtgacgagccatctgcagggcatgttcaaccggacgattcgagtgttagaggccggccttaaacctgtttacgtatttgacggtcagcctccagatttgaagaaaagggagctcgcaaaacgttttgcaaggcgcgaggatgctgctgaagatctggtcacagccaaggagacaggaaatgaggctgatgtggagaagtacagcaagaagacagtgaaggtcactaagcaacacaatgaggattgtcgtaagctgctacgacttatgggtgttcctgttgttgaggctccatctgaggctgaagctgaatgtgcatcgctgtgcaaggcagagaaggttttcgctgtggcatcagaggatatggattcgctcacatatggatcaacacgatttttacgtcaccttatggagccaacctctcggaaactacctgttctggagtttgatattgcaaaagtcttagaaggattgggtcttaacatggatcaatttgttgacttgtgcatattatgtgggtgcgactattgtgacacgatccgaggtattggacctcaaactgcccttaaaatgatacgtcaacatggttctttggagattgttctagaaaatttaaacaaagacagatatcaagtaccagatccatggccatatcaggaagcacgacgcctttttaaagagcccttagttactccgcccgaaaaggttccagaattcaagtggactgcaccagatacagagggactacgtcaacttctagtcgaagagaacggcttcaacaatgaccgagtgatgaaggctattgagaagctcaaggtggcaaagaacaaagcatcacaaggaagattagagagtttcttcggagtaagttcctcttccagcaacaagagaaaggaggcccctgattctgaagcttctgccggaaagcaggttaaaacggctgctgctgtaaaacctgctaaagctgcttcgaagaaaggtcctgcaaaggggggcaaaaagaaataa

SEQ ID NO: 717 - protein, 394 aa, Physcomitrella patens
MGIKGLTKLIADNAHGAVKEQKFENYFGRKIAIDASMSIYQFLIVVGRSGSELLTNDAGEVTSHLQGMFNRTIRVLEAGLKPVYVFDGQPPDLKKRELAKRFARREDAAEDLVTAKETGNEADVEKYSKKTVKVTKQHNEDCRKLLRLMGVPVVEAPSEAEAECASLCKAEKVFAVASEDMDSLTYGSTRFLRHLMEPTSRKLPVLEFDIAKVLEGLGLNMDQFVDLCILCGCDYCDTIRGIGPQTALKMIRQHGSLEIVLENLNKDRYQVPDPWPYQEARRLFKEPLVTPPEKVPEFKWTAPDTEGLRQLLVEENGFNNDRVMKAIEKLKVAKNKASQGRLESFFGVSSSSSNKRKEAPDSEASAGKQVKTAAAVKPAKAASKKGPAKGGKKK

SEQ ID NO: 718 - DNA, 1143 bp, Sorghum bicolor
atgggcatcaagggtttgacgaaactgctggcggacaatgcgcccaaggcgatgaaggagcagaagttcgagagctacttcggtcgcaaaatcgccatcgacgccagcatgagcatctaccagttcctgattgtagttggaaggacaggtatggaaactctcacaaatgaagctggtgaagtcactagtcatttgcaaggaatgttcaatcggacaataaggttactggaagcgggaatcaagccagtttatgtttttgatggcaagcctcctgatatgaagaaagaagagcttgctaaaagattctcaaaaagagaagatgcaactaatgatctgaaagaggcagtagaggcaggagataaagatgcggtggaaaaattgagcaagaggactgtaaaggtcacagcgcaacataacgatgattgtaaacgactgctaagacttatgggggttcctgttgtagaggcaccttctgaagcagaagcagaatgtgcagccctctgcaaaaatgataaggtgttcgctgttgcttcagaagatatggattcccttacttttggggctccaaggttccttcgtcatttaatggatccaagttccaagaaaatacctgtgatggaatttgacgttgccaaggttttggaggagcttgaactcaccatggaccagttcattgatttgtgcatcctgtgtggatgtgactactgtgatagcatcaaaggtatcgggggacaaacagctctgaaacttattcgtcaacatgggtccatagaaagcattttagagaatcttaataaagacagatatcaaattcctgaggactggccttaccaagaagctcgacgcttgttcaaggagcctaatgttacattggatgttcctgagctgaaatggactccacctgatgaggagggtctcataagtttcctggtaaaagataatggcttcaacgaagatcgggtgacaaaggccattgagaagatcaaatctgccaagaataaatcatcgcaaggaagacttgagtcctttttcaagccagttgccaccacatcagcaccgctgaaacggaaggagacttcggataaaacaagtaaggcagctgctgcgaacaagaaaacaaaggcaggtgggaagaagaagtaa

SEQ ID NO: 719 - protein, 380 aa, Sorghum bicolor
MGIKGLTKLLADNAPKAMKEQKFESYFGRKIAIDASMSIYQFLIVVGRTGMETLTNEAGEVTSHLQGMFNRTIRLLEAGIKPVYVFDGKPPDMKKEELAKRFSKREDATNDLKEAVEAGDKDAVEKLSKRTVKVTAQHNDDCKRLLRLMGVPVVEAPSEAEAECAALCKNDKVFAVASEDMDSLTFGAPRFLRHLMDPSSKKIPVMEFDVAKVLEELELTMDQFIDLCILCGCDYCDSIKGIGGQTALKLIRQHGSIESILENLNKDRYQIPEDWPYQEARRLFKEPNVTLDVPELKWTPPDEEGLISFLVKDNGFNEDRVTKAIEKIKSAKNKSSQGRLESFFKPVATTSAPLKRKETSDKTSKAAAANKKTKAGGKKK

SEQ ID NO: 720 - DNA, 1149 bp, Saccharomyces cerevisiae
atgggtattaaaggtttgaatgcaattatatcggaacatgttccctctgctatcaggaaaagcgatatcaagagcttttttggcagaaaggttgccatcgatgcctctatgtctctatatcagtttttaattgctgtaagacagcaagacggtgggcagttgaccaatgaagccggtgaaacaacgtcacacttgatgggtatgttttataggacactgagaatgattgataacggtatcaagccttgttatgtcttcgacggcaaacctccagatttgaaatctcatgagttgacaaagcggtcttcaagaagggtggaaacagaaaaaaaactggcagaggcaacaacagaattggaaaagatgaagcaagaaagaagattggtgaaggtctcaaaagagcataatgaagaagcccaaaaattactaggactaatgggaatcccatatataatagcgccaacggaagctgaggctcaatgtgctgagttggcaaagaagggaaaggtgtatgccgcagcaagtgaagatatggacacactctgttatagaacacccttcttgttgagacatttgactttttcagaggccaagaaggaaccgattcacgaaatagatactgaattagttttgagaggactcgacttgacaatagagcagtttgttgatctttgcataatgcttggttgtgactactgtgaaagcatcagaggtgttggtccagtgacagccttaaaattgataaaaacgcatggatccatcgaaaaaatcgtggagtttattgaatctggggagtcaaacaacactaaatggaaaatcccagaagactggccttacaaacaagcaagaatgctgtttcttgaccctgaagttatagatggtaacgaaataaacttgaaatggtcgccaccaaaggagaaggaacttatcgagtatttatgtgatgataagaaattcagtgaagaaagagttaaatctggtatatcaagattgaaaaaaggcttgaaatctggcattcagggtaggttagatgggttcttccaagtggtgcctaagacaaaggaacagctggctgctgcggcgaaaagagcacaagaaaataaaaaattgaacaaaaataagaataaagtcacaaagggaagaagatga

SEQ ID NO: 721 - protein, 382 aa, Saccharomyces cerevisiae
MGIKGLNAIISEHVPSAIRKSDIKSFFGRKVAIDASMSLYQFLIAVRQQDGGQLTNEAGETTSHLMGMFYRTLRMIDNGIKPCYVFDGKPPDLKSHELTKRSSRRVETEKKLAEATTELEKMKQERRLVKVSKEHNEEAQKLLGLMGIPYIIAPTEAEAQCAELAKKGKVYAAASEDMDTLCYRTPFLLRHLTFSEAKKEPIHEIDTELVLRGLDLTIEQFVDLCIMLGCDYCESIRGVGPVTALKLIKTHGSIEKIVEFIESGESNNTKWKIPEDWPYKQARMLFLDPEVIDGNEINLKWSPPKEKELIEYLCDDKKFSEERVKSGISRLKKGLKSGIQGRLDGFFQVVPKTKEQLAAAAKRAQENKKLNKNKNKVTKGRR

SEQ ID NO: 722 - DNA, 1149 bp, Solanum lycopersicum
atgggaatcaagggtttaatgaagctgttggctgacaatgctccaagtggaatgaaggagcagaagttcgagagctatttcggccgtaaaatagccatcgacgctagtatgagcatttatcagttcctgattgtagtaggacgaagcggtacggaaatgctcactaacgaagctggggaaactactagtcatttggtcgggatgttttcgcggacgattaggcttttggaagctggaatcaagccagtttatgtttttgatggcaagccccctgatttgaagaaacaagaacttgcaaaacgttactctagaagggaagatgccacagatgacttggctaaggctacagagagtggcaacaaggaggatattgagaaattcagcaagagaacagtaaaggttacatcacaacacaatgatgactgcaaaaaacttctcagactaatgggggtacctgctgttgaggctccttctgaagcagaggctcagtgtgctgcactttgcaaggcagaaaaggtttatgctgtggcctcagaagatatggattccttaacttttggagctccaaagtttcttcgccatttaatggatcctagctccaaaaagataccagtgatggaatttgacatctccaaggtattggagggacttgaacttagtatggatcagttcatagacttgtgcattctttgtggatgtgattactgtgatagcatccgaggcatagggccccagacggctttgaagcttgtacgccaacatgggtcaatggagagcatattagagaatattaacaaagagagatatcaaatacctgatgattggccttatgaagaggctaggcggctcttcaaggaaccattagttgttacagatgatgagcaaactgaactaaaatgggctgctcctgatgaagaagggttggttaactttctggtaaaggaaaatggattcaacattgatagagttacaaaggcaatagaaaagatcaagacagccaagaacaaatcttctcaggggcggttagaatcattctttaaaccagttagcacgtctgctccagttaaaagaaaggaaacatctcacaccactgagaaaggagctgctaacaagaaatcaaaggctggtggtagtaagaagaaaaagtag

SEQ ID NO: 723 - protein, 382 aa, Solanum lycopersicum
MGIKGLMKLLADNAPSGMKEQKFESYFGRKIAIDASMSIYQFLIVVGRSGTEMLTNEAGETTSHLVGMFSRTIRLLEAGIKPVYVFDGKPPDLKKQELAKRYSRREDATDDLAKATESGNKEDIEKFSKRTVKVTSQHNDDCKKLLRLMGVPAVEAPSEAEAQCAALCKAEKVYAVASEDMDSLTFGAPKFLRHLMDPSSKKIPVMEFDISKVLEGLELSMDQFIDLCILCGCDYCDSIRGIGPQTALKLVRQHGSMESILENINKERYQIPDDWPYEEARRLFKEPLVVTDDEQTELKWAAPDEEGLVNFLVKENGFNIDRVTKAIEKIKTAKNKSSQGRLESFFKPVSTSAPVKRKETSHTTEKGAANKKSKAGGSKKKK

SEQ ID NO: 724 - DNA, 1092 bp, Selaginella moellendorffii
atgaaggagcagaagtttgagagctactttgggcggaaaatcgctgtggatgcgagtatgagtatatatcagttcttgattgttgtgggacgaactggcactgaaatgctcacgaatgaggctggagaaattacaagtcatttgcagggaatgtttactcggacagttcgcttgctggagtccgggatgaagcctgtgtatgtctttgatggaaaacctccggagctgaagaaagctgagcttgtgaaaagaggtgcgaggcgtgaagaggccactgaagggcttacggaagcgatcgagaaaggtgaagtcgcggacatagagaagtatagcaagagaacagtaaaggtcacaaagcaacacaatgaagactgtcaaaagttgctacggctcatgggaattccggtcatcgaggctccctgcgaggcagaagctgaatgtgcggccttgtgcaaagctgacaaggtagtttatgccgtggcttctgaagacatggattcccttacctttggaagtccgagattcttacggcacctcatggagccagcttctcgtaaaataccagttatggagttccagatatctacggctcttcaagagctaaacctttccatggatcagtttattgatctttgcattctttgcgggtgtgactactgcgacacgattcgcggaattggaccacagacagctttgaaacttattagacagcacagtactttagaagcagtattggagaacttgaacaaggacagataccaaattccagaatcttggccttaccaagaagcccggcggctctttaaagagcccatcgtgctgccagatgaagagcttccggagctcaaatggaatgcacccgatgaggagggattgaaaaagtttctggtagaagagaatggattcaatatcgatcgcgtgacaaaggcaatcgagaggatcaagagcgccaagaacaagtcctcccagggaaggatggagtcatttttcaagcccgttgcgtcgtcctcgccagcagccgctgctacaaagagaaaggtgagtggagtgattgtggcgtggcgtgcgcaagttaaaagctccgtattgtaa

SEQ ID NO: 725 - protein, 363 aa, Selaginella moellendorffii
MKEQKFESYFGRKIAVDASMSIYQFLIVVGRTGTEMLTNEAGEITSHLQGMFTRTVRLLESGMKPVYVFDGKPPELKKAELVKRGARREEATEGLTEAIEKGEVADIEKYSKRTVKVTKQHNEDCQKLLRLMGIPVIEAPCEAEAECAALCKADKVVYAVASEDMDSLTFGSPRFLRHLMEPASRKIPVMEFQISTALQELNLSMDQFIDLCILCGCDYCDTIRGIGPQTALKLIRQHSTLEAVLENLNKDRYQIPESWPYQEARRLFKEPIVLPDEELPELKWNAPDEEGLKKFLVEENGFNIDRVTKAIERIKSAKNKSSQGRMESFFKPVASSSPAAAATKRKVSGVIVAWRAQVKSSVL

SEQ ID NO: 726 - DNA, 1149 bp, Solanum tuberosum
atgggaattaagggtttaatgaagctgttggctgataatgctccaagtggaatgaaggagcagaaattcgagagttatttcggtcgtaaaatagcaatcgatgctagtatgagcatttaccagttcctgattgtagtaggacgaagcggtacggaaatgctcactaacgaagctggggaaactactagtcatttggttgggatgttttcgcggacgattaggcttctggaagctggaatcaagcctgtttatgtttttgatggtaaaccccctgatttgaagaagcaagaacttgcaaaacgttactctagaagggaagatgccacagatgacttggctaaggctacagagagtggcaacaaggaggatattgagaaattcagcaagagaacagtaaaggttacgccacaacacaatgatgactgcaaaaagcttctcagactaatgggggtacctgctgttgaggctccttctgaagcagaggcccagtgtgctgcactttgcaaggcagaaaaggtttatgctgtggcctctgaagatatggattccttaacttttggagctccaaagtttcttcgccatttaatggatcctagctccaaaaagataccagtgatggaatttgatatctccaaggtattggagggacttgaacttagtatggatcagttcatagacttgtgcattctttgtggatgtgattactgtgatagcatccgaggcatagggccccagacggctttgaagcttgtacgccaacatgggtcaatggagagcatattagagaatattaacaaagagagatatcaaatacctgatgattggccttatgaagaggctaggcggctcttcaaggaaccattagttgttacagatgatgagcaaactgatctaaaatgggctgctcctgatgaagaagggttggttaactttctggtaaaggaaaatggattcaacattgatagagttacaaaggcaatagaaaagatcaagacagccaagaacaaatcttctcaggggcggttagaatcattctttaaaccagttagcacatctgctccagttaaaagaaaggaaacagctcacaccactgagaaaggagctgctaacaagaaatcaaaggctagtggtagtaagaagaaaaagtag

SEQ ID NO: 727 - protein, 382 aa, Solanum tuberosum
MGIKGLMKLLADNAPSGMKEQKFESYFGRKIAIDASMSIYQFLIVVGRSGTEMLTNEAGETTSHLVGMFSRTIRLLEAGIKPVYVFDGKPPDLKKQELAKRYSRREDATDDLAKATESGNKEDIEKFSKRTVKVTPQHNDDCKKLLRLMGVPAVEAPSEAEAQCAALCKAEKVYAVASEDMDSLTFGAPKFLRHLMDPSSKKIPVMEFDISKVLEGLELSMDQFIDLCILCGCDYCDSIRGIGPQTALKLVRQHGSMESILENINKERYQIPDDWPYEEARRLFKEPLVVTDDEQTDLKWAAPDEEGLVNFLVKENGFNIDRVTKAIEKIKTAKNKSSQGRLESFFKPVSTSAPVKRKETAHTTEKGAANKKSKASGSKKKK

SEQ ID NO: 728 - DNA, 1143 bp, Triticum aestivum
atgggagtgaagggtttgacgaagctactggcggacaacgcgcccaagtcgatgagggagcagaagttcgagagctacttcggccgccgcatcgccgtcgacgccagcatgtgcatctaccagttcctcattgtagttggaaggacagcgatggaaacccttacaaacgaagccggtgatatcaccagtcatttgcaaggcatgttcagccggacaataaggttgctcgaggcaggaattaaaccagtatatgtttttgatggcaagcctcctgaaatgaagaaggacgagcttttaaaaagacacgcaaagaggaatgaagcaacagaagagctgacgaaggcagtagaggcaggagatacggatgcaattgaaaaattcagcaagagaactgtaaaggtcacgaagcagcacaatgatgattgtaagcgtctactaagactgatgggtgttcctgttgtggaggctccttgtgaagcagaatcacaatgtgctgccctttgcaagaatgacaaggtgtatgctgttgcatccgaagatatggactcacttacttttggagctacacggtttgttcgtcatttgatggatccaagttccaggaaaatacctgttatggaatttgaagttgcgaaaattcttgaggagcttgaattcactatggaccaattcattgacttgtgcatcctctgtggatgtgactactgtgatagcattaaaggcattggtggtcttacagctctgaagctcattcgtcagcacgggtccattgagggcattctggaaaatattaataaagacaaatatcaaattcctgaggactggccttatcaagaggctcggcgcatgttcaaggaacccgatgtaacactggatattcccgagctcaaatggactgcacctgatgaggagggcctcgtgaactttctggtgaaagaaaatggtttcaatcaagatcgtgtgacaaaggccatagagaagattaaatcagcgaagaataaatcatcccaaggaaggctcgagtcatttttcaagccaactgttagcacatcagtgccattgaagcggaaggaaactgcagagaaaccagccagtgcagccgctagcaagaagacgaagtcaacccgcggaaggaagaaataa

SEQ ID NO: 729 - protein, 380 aa, Triticum aestivum
MGVKGLTKLLADNAPKSMREQKFESYFGRRIAVDASMCIYQFLIVVGRTAMETLTNEAGDITSHLQGMFSRTIRLLEAGIKPVYVFDGKPPEMKKDELLKRHAKRNEATEELTKAVEAGDTDAIEKFSKRTVKVTKQHNDDCKRLLRLMGVPVVEAPCEAESQCAALCKNDKVYAVASEDMDSLTFGATRFVRHLMDPSSRKIPVMEFEVAKILEELEFTMDQFIDLCILCGCDYCDSIKGIGGLTALKLIRQHGSIEGILENINKDKYQIPEDWPYQEARRMFKEPDVTLDIPELKWTAPDEEGLVNFLVKENGFNQDRVTKAIEKIKSAKNKSSQGRLESFFKPTVSTSVPLKRKETAEKPASAAASKKTKSTRGRKK

SEQ ID NO: 730 - DNA, 1173 bp, Thalassiosira pseudonana
atgggaatcaaaggcctagccaagctcctctccgacgaggcccccctctccctcaaagaagtccccctctcccacctccacgggcgcaaactagccatcgacgcctccatggccatctaccaattcctcatcgccgtccgatccggagggcccggcggccaaaacgccgccatgatgctcaccaatgccgatggagagacgacctctcatattcaggggatattcaatcgcaccattcgctttatcagtgagggcattcggccggtgtatgtgttcgacgggaagcctccgcagttcaagagcggagagttgttgaagaggagggagaagcggttgaaggccgagcaggcactcaaggctgcggaggagagtgggaacatcgaagagcaggacaaacagtcgaagcggttggtgcgagcggggacgaaagagaatgaagactgtatcaaattattgacgttgatgggtgttcccgtgattcgggctccgtgcgaggcagaagctcaggcggcagcattggcgcggagtgggaaggtgtatgccgctgccacggaggatatggacgcgttgacgtttcgtagcccggtgatggttcgtaagatgacatttgcaaatgcgtccaagagtgatgtgcagcagattttttatgacaaggccatcgaggggttggagataacgcatgatcagtttgtggatttgtgtattctcctcggttgtgattattgtgatactatcaagggaattggaccaaagactgcgttgaagttgataagggagcacaagaatattgagacaatattgaagcatttgaatagggagaagtacgtagttcctgacatctacgtcgaagcccgccgtctatttaaccaccacgaagtcttacccgacaacgaaatcgaactcaaatggacagaatgccaacccgaaccactcaaatccttcctcgtggacgaaatgggcttcaaccccgatcgtgtccaggcgagtattgaaaagttgcaaaaggcattcaaggcgagtgccaagcctcagagtaggatggattcgtttttcaaggtcaaggcaaatcccgagggtgataagaagaaggccgagaagagaaaggcggaactggcagcttccaggggaaaggggaagaagggcaagggaggtgggggattcaaaaaaaagtag

SEQ ID NO: 731 - protein, 390 aa, Thalassiosira pseudonana
MGIKGLAKLLSDEAPLSLKEVPLSHLHGRKLAIDASMAIYQFLIAVRSGGPGGQNAAMMLTNADGETTSHIQGIFNRTIRFISEGIRPVYVFDGKPPQFKSGELLKRREKRLKAEQALKAAEESGNIEEQDKQSKRLVRAGTKENEDCIKLLTLMGVPVIRAPCEAEAQAAALARSGKVYAAATEDMDALTFRSPVMVRKMTFANASKSDVQQIFYDKAIEGLEITHDQFVDLCILLGCDYCDTIKGIGPKTALKLIREHKNIETILKHLNREKYVVPDIYVEARRLFNHHEVLPDNEIELKWTECQPEPLKSFLVDEMGFNPDRVQASIEKLQKAFKASAKPQSRMDSFFKVKANPEGDKKKAEKRKAELAASRGKGKKGKGGGGFKKK

SEQ ID NO: 732 - DNA, 1194 bp, Volvox carteri
atgggaattcacggactgaccaaactgctcggcgataatgctccgggatgcatcaaggaaacaaaatttgaaaatctttttggacgcaaggttgctgtcgatgctagtatgcatatctatcagttcatggtagtcgtcggccggcagggtgaccagctgctgacgaacgaggctggcgacatcacaagccatctacaaggaatgtttttccgaacagcaagaatgctcgaagctggcatcaagcctgtgtacgtcttcgacggcaagcccccacaactcaagcaggaccagctcgctatgcgttcggaacgcagggccgacgccaacgaggccttagagaaggctaaggaggcgggggacgcggaggctgttgagaagtacagcaagcgttcggtccgtgtcaccaaggagcacaatgaggattgcaagcgattgctgcgtctcatgggcgtgcccgttgtggaagcaccttctgaggcagaggcgcagtgtgcggagatggccaaagctggcctagtgtacgggctagcaacggaggatatggacgcgctcacgttcggcgcgccacgtgtcatccgccaccttatggcccccagtagctccaatgtcccagtgcaggaaatcgaccgcgccgtggcgctccaggagctcggcctggacgatgaccagttcatcgacatgtgcattcttatggggtgcgattactgtggcaccatccgtggcatcggggccgtgcgcgcgctgcagctcatcaagaagcacggcagcatcgaggccattctggaggagctggacaaggccaagttcccagtgccggagcctttcccatacaaggagagccacgaattcttcaaaaacccagaggtcacgccggctgccgaactgccgcagcttaaatggagcagccccgacgaggaggggctagtgcagttcctggtgaacgaaaagaattttagcgagcagcgtgttcgggcagccgtctcgcgcatcaagcagcacaagggcaaggctaaccagggccgtatggatacgttcttcacggcactgccgaagtccaacacggacagtgccgctaaaaccaaagagccgcccgctaaggaggacaagaagcggaaaggcgggcctggcgcagcgccggcggccaaaggaccggtcaagaagggcaagtttggagtcggcggtggcaagaagtaa

SEQ ID NO: 733 - protein, 397 aa, Volvox carteri
MGIHGLTKLLGDNAPGCIKETKFENLFGRKVAVDASMHIYQFMVVVGRQGDQLLTNEAGDITSHLQGMFFRTARMLEAGIKPVYVFDGKPPQLKQDQLAMRSERRADANEALEKAKEAGDAEAVEKYSKRSVRVTKEHNEDCKRLLRLMGVPVVEAPSEAEAQCAEMAKAGLVYGLATEDMDALTFGAPRVIRHLMAPSSSNVPVQEIDRAVALQELGLDDDQFIDMCILMGCDYCGTIRGIGAVRALQLIKKHGSIEAILEELDKAKFPVPEPFPYKESHEFFKNPEVTPAAELPQLKWSSPDEEGLVQFLVNEKNFSEQRVRAAVSRIKQHKGKANQGRMDTFFTALPKSNTDSAAKTKEPPAKEDKKRKGGPGAAPAAKGPVKKGKFGVGGGKK

SEQ ID NO: 734 - DNA, 1140 bp, Zea mays
atgggcatcaagggtttgacgaaactgctggcggacaatgcgcccaaggcgatgaaggagcagaagttcgagagctacttcggccgcaaaatcgccgtcgacgccagcatgagcatataccagttcctgattgtagttggaaggacaggcatggaaactctcacaaatgaagctggtgaagtcactagtcatttgcaaggaatgttcaaccggacaataagattactggaagcgggaatcaagccagtttatgtttttgatggcaagcctcctgatatgaagaaacaagagcttgctaaaagatactcaaaaagagatgatgcaaccaaagatctgactgaggcagtagaggtaggagataaagatgcgattgaaaaattgagcaagaggactgtaaaggtcacaaggcaacacaacgaagattgtaaacggctattaagacttatgggggttcctgttgtagaggcaccttctgaagcagaagcagaatgtgcagccctttgcataaacgataaggtgttcgctgttgcttcagaagatatggactcccttacttttggggctccacggttccttcgtcatttaatggatccaagttccaagaaaatacctgtgatggaatttgatgttgccaaggttttggaggagcttgaactcaccatggaccagttcattgatttgtgcatcctgtgtggatgtgactattgtgatagcatcaaaggtatcggggggcaaacagctctgaaacttattcgtcaacatgggtccatagaaagcatcttggagaatcttaataaagacagatatcaaattcctgaggactggccttaccaagaagctcgacgcttgttcaaggagcctaatgtcacattggatattcctgagctaaaatggactgcacctgatgaggagggtctcataagtttcctggtaaaagataatggtttcaacgaagatcgggtgacaaaggccatagagaagatcaaatctgccaagaataaatcgtcgcaaggaagactcgagtcctttttcaagccaactgccaccacatcagcaccgctaaaacggaaggagacttcggataaaacaagcaaggcagctgcgaacaagaaaacaaaggctggtggaaagaagaaataa

SEQ ID NO: 735 - protein, 379 aa, Zea mays
MGIKGLTKLLADNAPKAMKEQKFESYFGRKIAVDASMSIYQFLIVVGRTGMETLTNEAGEVTSHLQGMFNRTIRLLEAGIKPVYVFDGKPPDMKKQELAKRYSKRDDATKDLTEAVEVGDKDAIEKLSKRTVKVTRQHNEDCKRLLRLMGVPVVEAPSEAEAECAALCINDKVFAVASEDMDSLTFGAPRFLRHLMDPSSKKIPVMEFDVAKVLEELELTMDQFIDLCILCGCDYCDSIKGIGGQTALKLIRQHGSIESILENLNKDRYQIPEDWPYQEARRLFKEPNVTLDIPELKWTAPDEEGLISFLVKDNGFNEDRVTKAIEKIKSAKNKSSQGRLESFFKPTATTSAPLKRKETSDKTSKAAANKKTKAGGKKK

SEQ ID NO: 736 - DNA, 1734 bp, Arabidopsis thaliana
atgggcatcaaggaccttctcagattcatgaaaccttatatccttcccattcacatccagaaatacgccgggaaacgagtgggaatcgatgcttattcatggctacacaaaggagcatactcatgtagtatggagttgtgtttagacactgatgggaagaagaagctgaggtacattgattactttatgcatagagtcaaccttcttcaacactatgagatcattcctgtcgttgttctcgatggtggtaatatgccctgcaaggctgccactggtgatgaacgtcataggaagcgaaaggctaactttgacgctgcaatggtgaagctgaaggaagggaatgtcgcagcagctactgagctttttcagagagcagttagtgtaacatcatccatggctcatcaattgattcaggttctgaaatcagaaaacgtcgaatttattgtagctccctatgaggctgatgctcagctagcatacctatccagcctcgaactggaacaaggcgggattgctgctgttataaccgaagacagcgatttacttgcatatggctgcaaagctgttatctttaagatggaccgctatggtaaaggagaggaactagttctagataatgtttttcaagctgttgatcaaaagccttccttccagaattttgatcaagagctattcactgcaatgtgcgtattggcgggctgtgattttctcccctcggttcctggtgttggtatttcaagagctcatgcattcatctccaagtaccagagtgtagaactcgttttgtcatttctcaagacaaaaaaaggcaaactagttcctgatgattattccagctctttcacggaagcagtttcagtttttcagcacgcacgtgtatatgactttgacgctaagaagctcaagcacttgaaacccctctcccacaacctcctgaatttaccagttgaacaacttgagttcctgggaccagatctgtcgccatctgttgctgttgcaattgctgaaggtaatgttgatcccataaccatgaaagcttttaaccacttctcggtttctaggaaaccgttgaagacgcctgttcgatcattcaaggaacaggaaaagggaagctcctttttggtatgttctttgtctaaaagtgaggaaataatagagctcaaaaggactgcagatgaagctatgattgatccagaagctattgtgaagaagaagatgtactctaaacaagattcagatctatacaaactgcttgcgcagcctaacagggatcaagtggttacccgacccagcaatccctcacttattccggacaacaacccgttcaagattagaaaaaccgatgaaatcaatctggaaatcgcagaatacggtgtgcaagaactcgctgattcgtttgtgaccaaaagcaaagcagtggacgtggcttcttcttcaccaaactctcacgaacacgaggatcaaaaagagtgtgttacaatcgatctgtccaaacttgatgccgctggaatcaaacaggacagtgagaagaacagagtgaaagaaacatttgaaacaacagaagtagatctagctgaagttcaagatcatgtgaacatgacgacaaagagagtgcgtggaacaaaacctagaaccgagaatttcaaagtgaaaacaagctgtaaaagttcagagaacaacaagactataatcaagaagaaacacagtatattagatttcttccagcgattgtaa

SEQ ID NO: 737 - protein, 577 aa, Arabidopsis thaliana
MGIKDLLRFMKPYILPIHIQKYAGKRVGIDAYSWLHKGAYSCSMELCLDTDGKKKLRYIDYFMHRVNLLQHYEIIPVVVLDGGNMPCKAATGDERHRKRKANFDAAMVKLKEGNVAAATELFQRAVSVTSSMAHQLIQVLKSENVEFIVAPYEADAQLAYLSSLELEQGGIAAVITEDSDLLAYGCKAVIFKMDRYGKGEELVLDNVFQAVDQKPSFQNFDQELFTAMCVLAGCDFLPSVPGVGISRAHAFISKYQSVELVLSFLKTKKGKLVPDDYSSSFTEAVSVFQHARVYDFDAKKLKHLKPLSHNLLNLPVEQLEFLGPDLSPSVAVAIAEGNVDPITMKAFNHFSVSRKPLKTPVRSFKEQEKGSSFLVCSLSKSEEIIELKRTADEAMIDPEAIVKKKMYSKQDSDLYKLLAQPNRDQVVTRPSNPSLIPDNNPFKIRKTDEINLEIAEYGVQELADSFVTKSKAVDVASSSPNSHEHEDQKECVTIDLSKLDAAGIKQDSEKNRVKETFETTEVDLAEVQDHVNMTTKRVRGTKPRTENFKVKTSCKSSENNKTIIKKKHSILDFFQRL

SEQ ID NO: 738 - DNA, 2208 bp, Arabidopsis thaliana
atgggtatacaagggcttttgccgttgttgaaatcgataatggtaccgattcatatcaaggagctcgagggttgtatcgtcgccgtcgatacatattcatggctacacaaaggggctttatcttgtagccgagagctctgcaagggattacccaccaagaggcatattcaatactgtatgcatagagtgaatttacttcgccatcatggagtgaagcctatcatggtctttgatggaggtccgttaccgatgaaactagaacaagagaataagcgtgctaggtccagaaaggaaaatcttgctcgtgcattggagcatgaagcaaatggaaattcctcagctgcttatgagtgctactcaaaggccgtagatatttcaccttctattgcacatgagttgatacaggttctgaggcaggagaatgttgattacgttgttgctccttacgaagctgatgcgcagatggcattcttagctattactaagcaagttgatgcgattatcactgaggattctgatctcataccttttggctgcctaagaatcattttcaaaatggacaagtttggtcatggtgttgagtttcaagcctccaagctacccaaaaataaggatctcagtctatcaggattttcaagccaaatgcttctcgaaatgtgcatattaagtggctgcgattatttgcagtcacttccaggaatgggactcaaaagagcacatgcactcattacaaaattcaaaagctatgacagggtaattaagcacttaaagtacagcacagtttcagttcctcctctttatgaagagtcattcaagagagctttactgactttcaagcatcaacgtgtctatgacccaaatgctgaagatatcatacacttgtgtgacatttctgacaaccttggtgaagattcagattttgtaggcccatcgatgccacaagatattgctaagggtatagctctaggccagcttgatcccttcacacagttgccattccaggctgagagtgttactcctaaattggctgttgatgatatatcccgtcccaaaagtttcaaacctgaaactgtaaagaaaaagcttgatttgccagtccaaaaaaaccttctcaccaagtacttctgctttgcgtctgttgaggcaaaaagaaaattcaaggctcctaggatatcaccaatgtctctgaccccaactgatgagtctccaagcattcctgatgacaacacaccagatttagatgctctttcaagccagacaacaaatgaatccccggtttatagcttgggtgagaatccatgtgttagcgaagttgcagagaaaagagattcacccgatgacgatgcagtggaaaggaatcacaaggaccttcatcataaatactgcgaacgggaagtggataggccgaagtcagatagtttgaaggttatagtaagaagcaagtattttaagcagaaacaggaggacaaaagtctgaaacaatcgatcccatgtcttaatgattgctctgtgattggtcagagaaaggctgttaaaactgtgattaacatgtcaagcgcgtctaaaagagaagagagtcacagagctatagcaacaagtccatgtttacaccatgaccgaatctacaacgatcatgaagatgctaaagaagcgagtttctctgccatgaacgaggtggctgagagaacaataaacacccacaagattaaccatcagatcaatgaagaagaacagaacccatccgttgaaattccttctgcctttagtactcccgagaatgttatacctctctcttccattgctattgatagttgccatggagttgcaacagggaagaggaagcttgactcagatgaaaaccttcacaaggaaaatttgaaatccaagcacatgcgcatggatgaaactgatactgctcttaatgcagaaacaccattagaaaccgatgatgttgagaagtttggatcgaacatttcacatatagggcattactcagaaatagcagagaaatcagtggaaagatttgtctcagctatatcgtctttcaaatattctgggactggctctcgtgctagcggtctccgtgcccctctcaaagatatccgcaacacttgtccgtccaaagggttatctcttaaaccagacatcagcaagtttggctatgcgtcaagcaaccgacacatggtgacaaagtcaaggagaatgtga

SEQ ID NO: 739 - protein, 735 aa, Arabidopsis thaliana
MGIQGLLPLLKSIMVPIHIKELEGCIVAVDTYSWLHKGALSCSRELCKGLPTKRHIQYCMHRVNLLRHHGVKPIMVFDGGPLPMKLEQENKRARSRKENLARALEHEANGNSSAAYECYSKAVDISPSIAHELIQVLRQENVDYVVAPYEADAQMAFLAITKQVDAIITEDSDLIPFGCLRIIFKMDKFGHGVEFQASKLPKNKDLSLSGFSSQMLLEMCILSGCDYLQSLPGMGLKRAHALITKFKSYDRVIKHLKYSTVSVPPLYEESFKRALLTFKHQRVYDPNAEDIIHLCDISDNLGEDSDFVGPSMPQDIAKGIALGQLDPFTQLPFQAESVTPKLAVDDISRPKSFKPETVKKKLDLPVQKNLLTKYFCFASVEAKRKFKAPRISPMSLTPTDESPSIPDDNTPDLDALSSQTTNESPVYSLGENPCVSEVAEKRDSPDDDAVERNHKDLHHKYCEREVDRPKSDSLKVIVRSKYFKQKQEDKSLKQSIPCLNDCSVIGQRKAVKTVINMSSASKREESHRAIATSPCLHHDRIYNDHEDAKEASFSAMNEVAERTINTHKINHQINEEEQNPSVEIPSAFSTPENVIPLSSIAIDSCHGVATGKRKLDSDENLHKENLKSKHMRMDETDTALNAETPLETDDVEKFGSNISHIGHYSEIAEKSVERFVSAISSFKYSGTGSRASGLRAPLKDIRNTCPSKGLSLKPDISKFGYASSNRHMVTKSRRM

SEQ ID NO: 740 - DNA, 1044 bp, Chlorella vulgaris
atgggcatacaagggctccttcctctgctgaaaagcatcacaaagtctccagtccacgtccgcaggtatagtggccaaaaggcagctgtggatgcttatggctggcttcacaaagcagcttattgttgttcctatgagctttgcgagggcatctactctgacaggtttgttgcgtattgcatgcaaagggtggagaccctgcaacaggccggtgtatcaccgatcataatctttgacggaggcaggctcccaatgaagtctgctgaggaaggcaccagggccaggagccgcagcgagaatctggagaaggcacgagcgtactggcaggcagggaatacaacagctgcatatgagtcgtaccagagggccgtggacatcagccctgccactgccaaacagctcatagaggcgctgaaggcagcaaatgtggaatacatagtggctccctatgaggcagatgctcagatggcctacttggcaatcaacggcattgtgcaagtggtcatctctgaagattctgacatgctggcatatggctgtccgcgagtgtttttcaagatggacaagaacggggacggccaggaaatctgcatggcagatctcccagagtgccgcaatcccagcttgatcggcttcacacctgacatgttcttggagatgtgcatccttgctggctgcgacttcctgaaggcgctgagctccattggcatcaaaaaggcgcatggccacatcagaaagtacaagacgttcatccgggtgtgcaagagcctgcgcttctcgggggtcaaggtgccccgcgagtacgaggcagacttccagagggcgctgtggaccttccggcaccagcgcgtgtactgcccggccgcccgcgccgtggtgcacctgcgccctctgccacccgggggcctggcagatggcgtgcttgtgctggctgccctgcccagcaaggaggaggctgacctgcccttcctggggcccatgctgcctgactctgtggcgcagggcattgccacaggtggacccttgctcctcgaagtctggtag

SEQ ID NO: 741 - protein, 347 aa, Chlorella vulgaris
MGIQGLLPLLKSITKSPVHVRRYSGQKAAVDAYGWLHKAAYCCSYELCEGIYSDRFVAYCMQRVETLQQAGVSPIIIFDGGRLPMKSAEEGTRARSRSENLEKARAYWQAGNTTAAYESYQRAVDISPATAKQLIEALKAANVEYIVAPYEADAQMAYLAINGIVQVVISEDSDMLAYGCPRVFFKMDKNGDGQEICMADLPECRNPSLIGFTPDMFLEMCILAGCDFLKALSSIGIKKAHGHIRKYKTFIRVCKSLRFSGVKVPREYEADFQRALWTFRHQRVYCPAARAVVHLRPLPPGGLADGVLVLAALPSKEEADLPFLGPMLPDSVAQGIATGGPLLLEVW

SEQ ID NO: 742 - DNA, 1026 bp, Chlorella sp.
atgggaatcgcggggctcctgccacagctgcgcagcatcaccaaaaaggcccacgtctccaagtaccgcggacaaacagtggcggtcgatgcctactgcctgctgcaccgtggagcatacacctgctctcgcgagctggtggaaggcgagcctacctcccgccacgtggcctactgcatggcccgcattgagctgctgttgggggcgggcgtgacgccgctggtggtcttcgacggtggccgcctgcccaacaaggcggacgaggagcggagccgtgaacgcaaccgtgaggagaacaagtcacgtgcacgtcagctgtggcagcagggcaacaaggcggcggctatggaatgctaccagaaggccgtggacatctcaccctcccatgcaaagcagtttgtggaggcgctgaagcggcgcagtatcaaatacgtggtggcaccgtatgaagcagacgcgcagatggcctaccttgcagtcaatggttatgttgatgtggtgctgactgaagattcggacctgctatgttatggctgtcccacggtcttcttcaagatggacaagaatggggagggggaggaggtgcagctggaggaccttccgcaatgcaaggacctggctttccaaggctttgggcacgacctgtttcaggagatgtgtgtgcttgctggctgcgattttgtgagctccctgccaggcatcggcatcaagaaggcgcaccagcatctgcgtcggacccgctgcttcctcaaggtggtacgctcgctgcgctttgatggaaccaagatccctgagggttacgagcaacgtgtgcagcgtgcactgtggaccttcaagcatcagcgggtgtactgtccccggcgccacgcagtcgtgcccctgcatgagattgcggatggcgacttggcggcaggggcacgggtgccatcagcaatgcaggtacattttggtttgcccgtattctgccctggtggtgccgctcgaccttgcttttgcgcaggcgctgccgtgctgttgcaccagtag

SEQ ID NO: 743 - protein, 341 aa, Chlorella sp.
MGIAGLLPQLRSITKKAHVSKYRGQTVAVDAYCLLHRGAYTCSRELVEGEPTSRHVAYCMARIELLLGAGVTPLVVFDGGRLPNKADEERSRERNREENKSRARQLWQQGNKAAAMECYQKAVDISPSHAKQFVEALKRRSIKYVVAPYEADAQMAYLAVNGYVDVVLTEDSDLLCYGCPTVFFKMDKNGEGEEVQLEDLPQCKDLAFQGFGHDLFQEMCVLAGCDFVSSLPGIGIKKAHQHLRRTRCFLKVVRSLRFDGTKIPEGYEQRVQRALWTFKHQRVYCPRRHAVVPLHEIADGDLAAGARVPSAMQVHFGLPVFCPGGAARPCFCAGAAVLLHQ

SEQ ID NO: 744 - DNA, 2199 bp, Drosophila melanogaster
atgggcattaccggcctaattcccttcgtgggcaaggcctcctcgcagctgcatctaaaagacattcgcggcagcacagtggccgtggacacatattgctggctacacaagggagtcttcggctgtgcggagaagttggcccgcggcgaggatacggatgtttatatacaatactgcttgaagtatgtgaacatgctgctgtcctacgacatcaagcccattctggtcttcgatgggcagcacttgccggccaaggctttgaccgaaaagcggagaagggactccaggaagcagagcaaagagcgggcggcggaactccttcgattgggtcgcatcgaggaggcccgatcccatatgcgacgctgcgtggatgtcacccacgacatggcgttgcggttgatccgggaatgccggagccggaatgttgactgcattgtggcgccctacgaggccgatgcccaaatggcctggctgaatagagcagatgtggcccagtacatcatcaccgaggactcggacttaacgctttttggagccaagaacatcatattcaagctggacctcaacggcagcggcctgctggtggaggcggaaaaacttcacctggccatgggctgcacggaggagaagtaccactttgacaagttccggcgcatgtgcatcctatccggctgtgattacctggactcactgcctggcatcggactggccaaggcgtgcaaatttatactaaaaacggaacaggaagacatgcgaatagcattaaaaaagattccaagttacctcaatatgcgcaatcttgaggtagatgacgactatattgaaaacttcatgaaagcggaggccaccttcaggcacatgtttatctacaacccgctagagcgtcgcatgcagcggttgtgtgccctcgaagattatgaaactgatgagcgctactgcagcaatgctggcaccttgctggaggatagcgagcaggctttgcacttggccctaggcaacttgaaccccttctctatgaagcgactggactcttggacaccggaaaaggcatggccaacgccgaagaacgtgaaacgatccaagcacaaaagtatttggcaaacgaattttcaaagcgaaaacactcacacgccgaagaaagaaaatccgtgtgccttgttcttcaaaaaagtggattttgtgggcaaaactctaaacgaggaaatcgaagctaatcagcgactggaacaggctaaacaaacggaggccgagttgtttaacatgtacagtttcaaagccaaaaggaggagaagtccgagcagggaagattctgtagatcaagaacgtacacctcctccgtcgccggtgcacaaaagtcggcacaatccatttgccaaggaaaggactggagaagaagctaatcagcgatccccagtagtttgtgagaatgcctctttgctgcgtttgcttagtccgaaaaaggcaagtccgttggatggagaagctggtgtaaaaaaggttgattcgcttaaaagaagcatattcgccaaggaacaagttcagatccgaagtcgcttcttcgccacgcaggatgaacagacaaggcttcaaagggagcacttaagagatacggaaaatgacgatatggatgagcagaagctgagctctcactcaggccataagaaactaagactagtatgtaaagacattccagggaagaacccaataagacaacgttgtagttcacaaatcagtgacggtgaaacagatacagataccacagcctcttctcttttggaatcacaagataaaggtgttccttcgcctttagaatcccaagaagatctcaacaactctcaaccccaaataccaactgaaggcaataccaattcaacaactattcgcattaagtcactggatttacttctggaaaactctccggaacccactcaggaatccgacaggaacaataatgatgccatcattctgctatcggacgacagctgtagctcggatcagagagcatcatctacctcatcctccagccagcaacgccagaactttttgccaaccagcaaacgaagagtggggctgagtaaaccctccactgccaagaagggcactcctaaatctaggacgaatggaaaactgggtgccgtgagccagaatcaaaccaagctcagcatgtttggcttccagacgaaacctgtcctcaaatag

SEQ ID NO: 745 - protein, 732 aa, Drosophila melanogaster
MGITGLIPFVGKASSQLHLKDIRGSTVAVDTYCWLHKGVFGCAEKLARGEDTDVYIQYCLKYVNMLLSYDIKPILVFDGQHLPAKALTEKRRRDSRKQSKERAAELLRLGRIEEARSHMRRCVDVTHDMALRLIRECRSRNVDCIVAPYEADAQMAWLNRADVAQYIITEDSDLTLFGAKNIIFKLDLNGSGLLVEAEKLHLAMGCTEEKYHFDKFRRMCILSGCDYLDSLPGIGLAKACKFILKTEQEDMRIALKKIPSYLNMRNLEVDDDYIENFMKAEATFRHMFIYNPLERRMQRLCALEDYETDERYCSNAGTLLEDSEQALHLALGNLNPFSMKRLDSWTPEKAWPTPKNVKRSKHKSIWQTNFQSENTHTPKKENPCALFFKKVDFVGKTLNEEIEANQRLEQAKQTEAELFNMYSFKAKRRRSPSREDSVDQERTPPPSPVHKSRHNPFAKERTGEEANQRSPVVCENASLLRLLSPKKASPLDGEAGVKKVDSLKRSIFAKEQVQIRSRFFATQDEQTRLQREHLRDTENDDMDEQKLSSHSGHKKLRLVCKDIPGKNPIRQRCSSQISDGETDTDTTASSLLESQDKGVPSPLESQEDLNNSQPQIPTEGNTNSTTIRIKSLDLLLENSPEPTQESDRNNNDAIILLSDDSCSSDQRASSTSSSSQQRQNFLPTSKRRVGLSKPSTAKKGTPKSRTNGKLGAVSQNQTKLSMFGFQTKPVLK

SEQ ID NO: 746 - DNA, 1512 bp, Glycine max
atgggaattcaggggtttttgccgctattgaagtcgattatggttccaatccacattaaggatctgaagggttgttctgtagccgtagacacctactcttggctccacaaaggtgccctctcttgcagcaccgaactctgcaaagggatgcccactaccaggcacattgagtattgcatgcacagagtaaatttgctgcgccattttggggttaagcctattctagtgtttgatggagggcttctgccaatgaagagtgaacaagagaacaagcgtgccagggctagaaaggataatcttgcacgtgcagttgagcatgagtcagatggaaattcagctgctgcttatgagtgctaccagaaagcagttgatatttcacctcaaattgcatgtgaactaattcaggtattgaagcaggagaacttgcagtatattgttgctccttacgaggcagatgcccagatgacattcttggcaattagtggacaagttgatgcagttataactgaagactctgatcttataccatttggttgcccaagaattatctttaaaatggacaagtttggtcaaggtgttcagtttcaggattccatgctacaaaagaataaggagcttagttttgaagggttcaacagacaaatgcttcttgaaatgtgtattttgagtggctgtgattatctgcagtccttgtcaggtatgggtctcaaaagggcccatgcaagcattaaaaaatttagaagttatgacaaggttcttaagcacttgagatatagtggagtttctgtgcctcccttttatgaagagtcattcaagaaggctatacttactttccaatatcaacgggtttatgatccaattaatgaaaatattgttcatttgtctaatatatctgatgatattggtgatgagttagactttttaggcccatatccttcatttttaatttataccttaacctgggatacaaccatgccaaaagatatagcacaaagaatagcaaaaggggatcttgatccaattaccaaaatgccatttgagggagagaatcttacagccagattagcaattgtggaaactagtcaattcaaaactcattctgaaagtgcaaagaaaaagattgatttgcccgtgcagaagaatctcttaactaagggaggaatgcagggcagcattctatggttcactgggatactgcctgatgctattgatgcttcagttttgcttctcttgaagcaaaaaggaaattcagagctcctcgggtgtcacctactgctgctaatgaaacaaagaactctactgcatattgactctgagaattggggcagtgtccctcctcctaatatccatatattttttttaacatattcttccttcctttctttctttagattggatatagttctgccacaaacaattctgaatttacagagtctccatgtcatgagaagaaaagccctgaacatacagtactgcgaaagcccaggcagccaattcataaaccgtgtctag

SEQ ID NO: 747 - protein, 503 aa, Glycine max
MGIQGFLPLLKSIMVPIHIKDLKGCSVAVDTYSWLHKGALSCSTELCKGMPTTRHIEYCMHRVNLLRHFGVKPILVFDGGLLPMKSEQENKRARARKDNLARAVEHESDGNSAAAYECYQKAVDISPQIACELIQVLKQENLQYIVAPYEADAQMTFLAISGQVDAVITEDSDLIPFGCPRIIFKMDKFGQGVQFQDSMLQKNKELSFEGFNRQMLLEMCILSGCDYLQSLSGMGLKRAHASIKKFRSYDKVLKHLRYSGVSVPPFYEESFKKAILTFQYQRVYDPINENIVHLSNISDDIGDELDFLGPYPSFLIYTLTWDTTMPKDIAQRIAKGDLDPITKMPFEGENLTARLAIVETSQFKTHSESAKKKIDLPVQKNLLTKGGMQGSILWFTGILPDAIDASVLLLLKQKGNSELLGCHLLLLMKQRTLLHIDSENWGSVPPPNIHIFFLTYSSFLSFFRLDIVLPQTILNLQSLHVMRRKALNIQYCESPGSQFINRV

SEQ ID NO: 748 - DNA, 1695 bp, Glycine max
atgggcatcaaggatcttctgaggttcatgaaaccttacattgaacctgtccacatcaagaagtacgctggaaaacgcgtgggtattgatgcgtattcatggcttcacaaaggggcttattcgtgtagtatggagctttgtctggattctaatagtgaaaggaagttgcggtacattgactattttatgcatagagtgaacttgcttcgcttctataaaataactccagttgttgtttttgatggttgcaatgttccttgcaaggccgcaactgaggaagagagaaacaggcatctcaaagaagggaatgttggtgcagcttcagagctcttccagagagcagtgagtattactcccgttatggcacataagctaattcagaccctaaaatcagagaagattgagtttgttgtagctccatatgaagcagatgctcagttagcgtacatgtctcagcttggagtagaaaatggtggagttgcagcggtgatcacagaagatagtgatctaatagcatatggctgtccagctattatttttaagatggaccgtcatgggaatggtgaaagaattgagttagagaaagtgttttctgctgagtctggtagaccttcatttcggagtttcaatatgaaactcctcacaggtatgtgcgtcttagctggctgtgattttcttccatctgttcctggaattggtattgctcgagctcatgctttagtttccaagtatcggaacctagatcgtatcttgtctgttcttaagatcgagaaaggtgaccaaatgcctgaagattatgccaaatcctttcaagaggctgttgcggtttttgagcatgctcaaatatatgatgtcaattctaaagagctcaagcacatgaatcctcttccagaaaattttcttgggtcacttgatggaaaatttgatttcttgggaccagaaattcctccatcaatagtcacagcaatagctgaaggaaacttgaatccgtcaactaagaaagcctttgataagtctgaatgttctagatttcctctacagcccattgatctccaaagcattgatcaagtccggaaagctgaagttcctgcaccatctagacaggggagtagcttttcaatcatcacctctcattacaccagagaaagtaatgcagtggcaaggctttcagataaagataagtattccaatgaagcattagcacttcataaactaatcatgccattgggaaataatggaacagaggaaaagactattatatctgatttcactcctttgaagtttcctgacaacaatccattcaggataagaaaaaatgagggaacatatcagacaaaggacactgtacaaaaagtttcttttgccagcaacatgggatataccgacttatgcatgtctccagatgactttgaagaaaaggggtctgagaatctctcaaggaaaaggaaatttcagaacttttgctcagataaagttgaagccactgatgaactgttttcaggagtgactgaagtagaaaaatctgatattccatgcatggctgtggaatcccccgaaagtataaattctgatcagactaagaaaattgccgatttgaaaggaagaagtgaaagtaataagcaatccaagagaagcaacagcaagaaaacggggagtaacaacataactcttttgagtttcttttctagagtgtaa

SEQ ID NO: 749 - protein, 564 aa, Glycine max
MGIKDLLRFMKPYIEPVHIKKYAGKRVGIDAYSWLHKGAYSCSMELCLDSNSERKLRYIDYFMHRVNLLRFYKITPVVVFDGCNVPCKAATEEERNRHLKEGNVGAASELFQRAVSITPVMAHKLIQTLKSEKIEFVVAPYEADAQLAYMSQLGVENGGVAAVITEDSDLIAYGCPAIIFKMDRHGNGERIELEKVFSAESGRPSFRSFNMKLLTGMCVLAGCDFLPSVPGIGIARAHALVSKYRNLDRILSVLKIEKGDQMPEDYAKSFQEAVAVFEHAQIYDVNSKELKHMNPLPENFLGSLDGKFDFLGPEIPPSIVTAIAEGNLNPSTKKAFDKSECSRFPLQPIDLQSIDQVRKAEVPAPSRQGSSFSIITSHYTRESNAVARLSDKDKYSNEALALHKLIMPLGNNGTEEKTIISDFTPLKFPDNNPFRIRKNEGTYQTKDTVQKVSFASNMGYTDLCMSPDDFEEKGSENLSRKRKFQNFCSDKVEATDELFSGVTEVEKSDIPCMAVESPESINSDQTKKIADLKGRSESNKQSKRSNSKKTGSNNITLLSFFSRV

SEQ ID NO: 750 - DNA, 2541 bp, Homo sapiens
atggggatacagggattgctacaatttatcaaagaagcttcagaacccatccatgtgaggaagtataaagggcaggtagtagctgtggatacatattgctggcttcacaaaggagctattgcttgtgctgaaaaactagccaaaggtgaacctactgataggtatgtaggattttgtatgaaatttgtaaatatgttactatctcatgggatcaagcctattctcgtatttgatggatgtactttaccttctaaaaaggaagtagagagatctagaagagaaagacgacaagccaatcttcttaagggaaagcaacttcttcgtgaggggaaagtctcggaagctcgagagtgtttcacccggtctatcaatatcacacatgccatggcccacaaagtaattaaagctgcccggtctcagggggtagattgcctcgtggctccctatgaagctgatgcgcagttggcctatcttaacaaagcgggaattgtgcaagccataattacagaggactcggatctcctagcttttggctgtaaaaaggtaattttaaagatggaccagtttggaaatggacttgaaattgatcaagctcggctaggaatgtgcagacagcttggggatgtattcacggaagagaagtttcgttacatgtgtattctttcaggttgtgactacctgtcatcactgcgtgggattggattagcaaaggcatgcaaagtcctaagactagccaataatccagatatagtaaaggttatcaagaaaattggacattatctcaagatgaatatcacggtaccagaggattacatcaacgggtttattcgggccaacaataccttcctctatcagctagtttttgatcccatcaaaaggaaacttattcctctgaacgcctatgaagatgatgttgatcctgaaacactaagctacgctgggcaatatgttgatgattccatagctcttcaaatagcacttggaaataaagatataaatacttttgaacagatcgatgactacaatccagacactgctatgcctgcccattcaagaagtcatagttgggatgacaaaacatgtcaaaagtcagctaatgttagcagcatttggcataggaattactctcccagaccagagtcgggtactgtttcagatgccccacaattgaaggaaaatccaagtactgtgggagtggaacgagtgattagtactaaagggttaaatctcccaaggaaatcatccattgtgaaaagaccaagaagtgcagagctgtcagaagatgacctgttgagtcagtattctctttcatttacgaagaagaccaagaaaaatagctctgaaggcaataaatcattgagcttttctgaagtgtttgtgcctgacctggtaaatggacctactaacaaaaagagtgtaagcactccacctaggacgagaaataaatttgcaacatttttacaaaggaaaaatgaagaaagtggtgcagttgtggttccagggaccagaagcaggtttttttgcagttcagattctactgactgtgtatcaaacaaagtgagcatccagcctctggatgaaactgctgtcacagataaagagaacaatctgcatgaatcagagtatggagaccaagaaggcaagagactggttgacacagatgtagcacgtaattcaagtgatgacattccgaataatcatattccaggtgatcatattccagacaaggcaacagtgtttacagatgaagagtcctactcttttgagagcagcaaatttacaaggaccatttcaccacccactttgggaacactaagaagttgttttagttggtctggaggtcttggagatttttcaagaacgccgagcccctctccaagcacagcattgcagcagttccgaagaaagagcgattcccccacctctttgcctgagaataatatgtctgatgtgtcgcagttaaagagcgaggagtccagtgacgatgagtctcatcccttacgagaaggggcatgttcttcacagtcccaggaaagtggagaattctcactgcagagttcaaatgcatcaaagctttctcagtgctctagtaaggactctgattcagaggaatctgattgcaatattaagttacttgacagtcaaagtgaccagacctccaagctatgtttatctcatttctcaaaaaaagacacacctctaaggaacaaggttcctgggctatataagtccagttctgcagactctctttctacaaccaagatcaaacctctaggacctgccagagccagtgggctgagcaagaagccggcaagcatccagaagagaaagcatcataatgccgagaacaagccggggttacagatcaaactcaatgagctctggaaaaactttggatttaaaaaagattctgaaaagcttcctccttgtaagaaacccctgtccccagtcagagataacatccaactaactccagaagcggaagaggatatatttaacaaacctgaatgtggccgtgttcaaagagcaatattccagtaa

SEQ ID NO: 751 - protein, 846 aa, Homo sapiens
MGIQGLLQFIKEASEPIHVRKYKGQVVAVDTYCWLHKGAIACAEKLAKGEPTDRYVGFCMKFVNMLLSHGIKPILVFDGCTLPSKKEVERSRRERRQANLLKGKQLLREGKVSEARECFTRSINITHAMAHKVIKAARSQGVDCLVAPYEADAQLAYLNKAGIVQAIITEDSDLLAFGCKKVILKMDQFGNGLEIDQARLGMCRQLGDVFTEEKFRYMCILSGCDYLSSLRGIGLAKACKVLRLANNPDIVKVIKKIGHYLKMNITVPEDYINGFIRANNTFLYQLVFDPIKRKLIPLNAYEDDVDPETLSYAGQYVDDSIALQIALGNKDINTFEQIDDYNPDTAMPAHSRSHSWDDKTCQKSANVSSIWHRNYSPRPESGTVSDAPQLKENPSTVGVERVISTKGLNLPRKSSIVKRPRSAELSEDDLLSQYSLSFTKKTKKNSSEGNKSLSFSEVFVPDLVNGPTNKKSVSTPPRTRNKFATFLQRKNEESGAVVVPGTRSRFFCSSDSTDCVSNKVSIQPLDETAVTDKENNLHESEYGDQEGKRLVDTDVARNSSDDIPNNHIPGDHIPDKATVFTDEESYSFESSKFTRTISPPTLGTLRSCFSWSGGLGDFSRTPSPSPSTALQQFRRKSDSPTSLPENNMSDVSQLKSEESSDDESHPLREGACSSQSQESGEFSLQSSNASKLSQCSSKDSDSEESDCNIKLLDSQSDQTSKLCLSHFSKKDTPLRNKVPGLYKSSSADSLSTTKIKPLGPARASGLSKKPASIQKRKHHNAENKPGLQIKLNELWKNFGFKKDSEKLPPCKKPLSPVRDNIQLTPEAEEDIFNKPECGRVQRAIFQ

SEQ ID NO: 752 - DNA, 1842 bp, Medicago truncatula
atgggaatccatggtctgttaccgctactcaaatcaattatgattccaattcacatcaaagactttcacggctgttctgtcgccatcgacacttattcctggcttcacaaaggtgccctttcttgcagcaccgacctctgtaaaggcatacccactactaggcacattgagtattgtatgcatagagtgaatttgctgagacattatggtgttaagcctattcttgtatttgatggagggcttttaccaatgaagggtgatcaagagaacaagcgtgcccggtctagaaaagaaaatttggaacgtgcggttgaacatgaagcaaatggaaattctactgctgcctatgagtgctatcagaaagctgttgatatttcacctcagattgcacgagaacttattcaggtactgaagcaagagaatgtgcagtatgttgttgccccatatgaggcagatgcccagatgacatttttggcaattagcaaacaggttgatgcagttataaccgaagactctgatcttataccatttggttgtccaaggattatctttaaaatggacaagtttggtcaaggtgttcagtttcagtattccatgctacaaaagaataaggagcttaattttgaagggttcaacaaacaaatgcttcttgaaatgtgtattttgagtggctgcgactatcttcagtccttgccaggcatgggtctcaaaaaggctcatgcaagcattaaaagatttaaaagctatgacaaggttcttaagcacttgaaatacaacggtgtttctgtacctcccttttacgaagagtcgttcaggaaggctattcttactttccaatatcaacgagtttatgatccagttagtgaaaatattgtccatttggctaatatacctgaggatattgatcttattcaaaataataccttaacccgatacacaccattgccaaaagatataggacaaggaatagcagaaggagatcttgatccaattaccaaaatgccatttgagggagacaaatttgctgccagattggaaattgcaggaactagtcaattcaaaacacttaattctgaaagggtgaagaaaaggattgatctgcctgtgcagaagaatctcttgaccaataatttttccttagccacgaaaggttttgcatcccttgaagcaaaaagggaattcaaagcgcctcggacgtcacctaccactgctaatcaaagtacactgatttcctcttctgtcaattccctagaacatcagacattagaagctgctgctagagaaacagtgaactctggtgcatccactgttgacactgagaattgtgacagcagccttcctcctaatagctatattgaaaacagttttcccaccaaaactttggagcttatggaatcaccgaatcatggagagaagaaaggaagtcctgatcatacaatattgagacagccgaggcagccaattcataaaccttgtttggggttgcataaggagcatgagctcacaaatgtcgaagacaaagccgaagagaaaaccaaggagacaaaaagaaaggtaattgtaaggagtcgttattttcagcagaaacaagtagaaaagaatgcttgtgacgtgaaacaagagcagctgtcctcttgcatcgtcattgatgagagaaaaaatggcatatcaggcggtgatttatgtaacaagcatttgaagaatgatgacctgaaaaagaaggtctaccctaatgacactattcaaagtgaaaatttgcaggccaggaaaatgaatcctacttcatctactcatgataatggtatatatttattagaagagaaactttgcaggcaatattag

SEQ ID NO: 753 - protein, 613 aa, Medicago truncatula
MGIHGLLPLLKSIMIPIHIKDFHGCSVAIDTYSWLHKGALSCSTDLCKGIPTTRHIEYCMHRVNLLRHYGVKPILVFDGGLLPMKGDQENKRARSRKENLERAVEHEANGNSTAAYECYQKAVDISPQIARELIQVLKQENVQYVVAPYEADAQMTFLAISKQVDAVITEDSDLIPFGCPRIIFKMDKFGQGVQFQYSMLQKNKELNFEGFNKQMLLEMCILSGCDYLQSLPGMGLKKAHASIKRFKSYDKVLKHLKYNGVSVPPFYEESFRKAILTFQYQRVYDPVSENIVHLANIPEDIDLIQNNTLTRYTPLPKDIGQGIAEGDLDPITKMPFEGDKFAARLEIAGTSQFKTLNSERVKKRIDLPVQKNLLTNNFSLATKGFASLEAKREFKAPRTSPTTANQSTLISSSVNSLEHQTLEAAARETVNSGASTVDTENCDSSLPPNSYIENSFPTKTLELMESPNHGEKKGSPDHTILRQPRQPIHKPCLGLHKEHELTNVEDKAEEKTKETKRKVIVRSRYFQQKQVEKNACDVKQEQLSSCIVIDERKNGISGGDLCNKHLKNDDLKKKVYPNDTIQSENLQARKMNPTSSTHDNGIYLLEEKLCRQY

SEQ ID NO: 754 - DNA, 993 bp, Ostreococcus lucimarinus
atgggcatcgcgtccctccttccgacgctgaaatccatctcaagacacgcgcacgtcggcgaaacgtacgcgggacaagtcgtttgcgtcgacgcctacgtctggcttcatcgcggtgcctacgcgtgctcgcgcgagctgtgcgagggattgccgacgcgcaagcacgtggaatactttttaaatcgcgcgcgaacgctgaaacgggcgaacgtgcgggcgatatacgtgttcgacggtggacgattgccggggaaggcgaacgaggaggcgcagcggagacgaaatcgaagcgaagcgctggccaaggcgaaagcgcacgcgaggcaggggaacgcgagcgcggcgaatgatttttatgtgcgagcggtggatatcacgccggagatggcgcgggaggtgatcgaggcgctggcgagggaaggattcgagagcttgacggcgccgtacgaggcggatgcgcagatggcgtacttggtgaagaatggcttcgtggcgggagtgatcacggaggatagcgatttgatcgcgcatgggtgtcggagcgtgttcacaaagatggcaggtgatggttctggcatagaaatccgcttcgaggagttggggaggaatcgcgggttgagtttcgtcgggttcacgcccgatatgtttttggaaatgtgcgtactcagcgggtgtgattatttaccgtctttgaacggcgtgggggtgaagaaggcgcacagcctgattcgaagattcaaaacttacaataaggtcttgcgtcacatgaagtttgaggggatagcggtgccgaaggattacgagtcgcgtttcgtcgacgcgttgctcacgttcaaatattcgtgggtgtattgcccgcaaaggcgagagatcgtgaacttgaacgatccagtgggggtgttggatcagagtttgattgacgacttaccgagactcatagcacatagccgcgttggcgccatcgacgagcgcgccgatcctaaggcctga

SEQ ID NO: 755 - protein, 330 aa, Ostreococcus lucimarinus
MGIASLLPTLKSISRHAHVGETYAGQVVCVDAYVWLHRGAYACSRELCEGLPTRKHVEYFLNRARTLKRANVRAIYVFDGGRLPGKANEEAQRRRNRSEALAKAKAHARQGNASAANDFYVRAVDITPEMAREVIEALAREGFESLTAPYEADAQMAYLVKNGFVAGVITEDSDLIAHGCRSVFTKMAGDGSGIEIRFEELGRNRGLSFVGFTPDMFLEMCVLSGCDYLPSLNGVGVKKAHSLIRRFKTYNKVLRHMKFEGIAVPKDYESRFVDALLTFKYSWVYCPQRREIVNLNDPVGVLDQSLIDDLPRLIAHSRVGAIDERADPKA

SEQ ID NO: 756 - DNA, 2511 bp, Oryza sativa
atggggatccagggattgctgccgcagctgaagtcgatcatggcgcccatcggggtggaggcgctcaagggccagacggtggccgtcgacacctactcctggctccacaagggcgccctctcctgcggcgaccgcctctgcaagggcctacccaccaccaggcatattgagtattgcatgcatagggttaacatgttgcggcaccatggcgtgaaaccaatccttgtatttgacggaggtcatctgccgatgaagggtgatcaagagactaaacgtgaaaggtcacgaaaggaaaatcttgagcgtgccaaggagcatgaatctgctgggaattcacgtgctgcttttgagtgttatcagaaagctgttgacattacacctaggattgcttttgaactgatccaggtattgaagcaagaaaaggttgattatattgttgcgccttatgaagcagatgcacaaatgacattcttgtctgtgaacaaacttgttgatgccgttatcacagaggattctgatctgataccatttggctgttctagaattattttcaagatggacaagtttggacaaggtgttgaatttcatattacacgattgcagcgatgcagggagcttgatcttaatggattcactatgcaaatgctactagagatgtgtattttaagtggctgtgattatcttccatcattgcctggaatgggtgtgaaacgagctcatgcacttatccaaaagctcaagggtcatgaaaaggtaatcaagcacctgaggtacagtgctgtttctgttccacctcaatatgaagaaaacttcagaaaggcgatctgggcatttcagttccaaagagtttatgaccctgtgacggaagatattgttcatttgtcaggcattccccatggcagtagtgaagacttggactttttgggcccatggctaccacagactgttgctaaaggcattgcccaagggaatatcgatccgattaccaaggaaccatttgagggcaaaacagagagtagcgcactcgcttttgataaagtgcatctgaacagagagtccagtgctccttcaaatggaaagaaaaagcttgatctacctgtccaaagaaacgtattgacaaattacttctgcttagcatcgcttgaggcaaaacggaagttcagagcacctaaggttacacctaagcaacaagtacttaatgggtctttgcccagtcccagaattgaagactctggtacccctgatttaattgaagatactagcttgccatcaaataacattcaagtttatcagtgtagttctgagcattttagctcaggaacccctctagatgattcaatcaataccgcctctcaatgtagttctgagcgtgtccgctgtgacatccctcgggatgattcagccagtgtttcaccccagtgttctcatgatattggtagtgatcctgctgaggacccagacattgaaggcaacaaggtgaaagtcaacttctgcaacagaagtacaataccgacaggctctttcttagaggggactttgcctgggatatcagatccatttttagattcacacaacacagagccatccagagctgcaccacgttatgctgaaaaaagcaatgtggtctctgccaatagaaatattactgtgaggagttcatatttcaaaacagtaaataaaagagtttgcacaaatcaaggagaagatgagtgccatgatgaagataactgcgagactggtaattacactcttcctggagatcaacaaagaagctctggaggtatattgaagagaagaaaatttagtgatccccaaaattttgaagatggaatgtttcaacccactagtcctcatgaaagtccaccggttgctgataaaggctgtgactctgattcccacgacggtatcaacacaaattctgaaggaaaatttggatgcaatgtcgcccatgtaaataaatacagtggcattgcagagaaatcaatggataagtttgctgcgctgatatcatctttcagatacgcaggctctcgtgccagtggtcttcgcgctcctttaaaggatgtgaagaacactcttcctgtcagatctgttctcagacctccagaacagagattcggttgtacggctaagaagactactagagtgcctctacaaagcagattctcaagtgatgctacaaacagcactgacgttcctgatctgagcacatttgcatacaggcctacaactgcttctgctcattctgatcaggggaagatcacaagcaaagctacagatgctgctgctggacctcctgacctgagaacatttgcttatgcaccaacaagatctaccaccagccgttttgatcagagtgaaaacacgcgcaaagctatgtgcactgcggacagccctcctgatattagcacattcgaatataaacccatgaaaagcgccgtcagacgttcagatgggagcaagttttcaggtgcagcactaaaagcagctagacgaacctctcggagctga

SEQ ID NO: 757 - protein, 836 aa, Oryza sativa
MGIQGLLPQLKSIMAPIGVEALKGQTVAVDTYSWLHKGALSCGDRLCKGLPTTRHIEYCMHRVNMLRHHGVKPILVFDGGHLPMKGDQETKRERSRKENLERAKEHESAGNSRAAFECYQKAVDITPRIAFELIQVLKQEKVDYIVAPYEADAQMTFLSVNKLVDAVITEDSDLIPFGCSRIIFKMDKFGQGVEFHITRLQRCRELDLNGFTMQMLLEMCILSGCDYLPSLPGMGVKRAHALIQKLKGHEKVIKHLRYSAVSVPPQYEENFRKAIWAFQFQRVYDPVTEDIVHLSGIPHGSSEDLDFLGPWLPQTVAKGIAQGNIDPITKEPFEGKTESSALAFDKVHLNRESSAPSNGKKKLDLPVQRNVLTNYFCLASLEAKRKFRAPKVTPKQQVLNGSLPSPRIEDSGTPDLIEDTSLPSNNIQVYQCSSEHFSSGTPLDDSINTASQCSSERVRCDIPRDDSASVSPQCSHDIGSDPAEDPDIEGNKVKVNFCNRSTIPTGSFLEGTLPGISDPFLDSHNTEPSRAAPRYAEKSNVVSANRNITVRSSYFKTVNKRVCTNQGEDECHDEDNCETGNYTLPGDQQRSSGGILKRRKFSDPQNFEDGMFQPTSPHESPPVADKGCDSDSHDGINTNSEGKFGCNVAHVNKYSGIAEKSMDKFAALISSFRYAGSRASGLRAPLKDVKNTLPVRSVLRPPEQRFGCTAKKTTRVPLQSRFSSDATNSTDVPDLSTFAYRPTTASAHSDQGKITSKATDAAAGPPDLRTFAYAPTRSTTSRFDQSENTRKAMCTADSPPDISTFEYKPMKSAVRRSDGSKFSGAALKAARRTSRS

SEQ ID NO: 758 - DNA, 945 bp, Physcomitrella patens
atggggattcaggggttgctccctaccctgaagtccatcatgaacccacggcacattcgggattatgctggaaagcgggtggccattgacacctactcctggctacacaaagccgcattcagttgcagtaaggagttatgccttgggctgcctaatgacaagtacatagactattgcatgcatcgggtcaacatgctgcggcacttcggtttgcagcccgtccttgtgtttgatgggggtggccttccaatgaagtctgatcaggaaatgaaacgtgccagatcgaggaaggagaatttggaacgtgctctggagcacgagcgcctgggaaacttcaccgctgcgatgcaatgttatcagagggccgtagacataacacctgcaatagctttcaggctgataaaggttttgcgccaggaaaacgtggagtatgtggttgcaccgtatgaagcagatgctcaaatggcttttttagctcgcaatggacacgtggatcttgtcatcactgaagattctgaccttattgcatatggttgcccgcagatatttttcaagatggacaagtatggacaaggtgtggggtttcagttctctgacattacggccaacaaagacattgacttcaacaatttctccagacaaatgattcttgaaatgtgcataatgagtggttgcgattacttgccttccttgccaggaatgggcgtaaaaaaagctcatggcttaatgaaacgttttaagacttatataaaggtaatgaagcacttgaagttcagtggcgtcctgatagatgaacaatacgagcaaggttttcggagagcaatattaacatttcagcatcatcgtgtttatgaccctgccaaaagggcaatggttcatctcaccgatgtaccaggcgaactcgttaacgatctacattttctgggaccatatcctaccttctaa

SEQ ID NO: 759 - protein, 314 aa, Physcomitrella patens
MGIQGLLPTLKSIMNPRHIRDYAGKRVAIDTYSWLHKAAFSCSKELCLGLPNDKYIDYCMHRVNMLRHFGLQPVLVFDGGGLPMKSDQEMKRARSRKENLERALEHERLGNFTAAMQCYQRAVDITPAIAFRLIKVLRQENVEYVVAPYEADAQMAFLARNGHVDLVITEDSDLIAYGCPQIFFKMDKYGQGVGFQFSDITANKDIDFNNFSRQMILEMCIMSGCDYLPSLPGMGVKKAHGLMKRFKTYIKVMKHLKFSGVLIDEQYEQGFRRAILTFQHHRVYDPAKRAMVHLTDVPGELVNDLHFLGPYPTF

SEQ ID NO: 760 - DNA, 984 bp, Physcomitrella patens
atggggatccaggggttgctgcccaccctgaagtctatcatgcaccctcgacacgcacaggagtatgctggaaagcgggccgcgattgatacttattcttggctccacaaggccgtcctcagctgcagcagggatttgtgtcatgggcgccacaatgacaagtacatagactactgcatgcgtagagtccaaatgttgcgatactacggcgtgcagcccgtcctagtgttcgatggaggtagcctccctatgaagtctgatcaggaaattaagcgtgccagatcaaggaaggagaacctggaacgtgccttggagtatgaacggttgggaaaccactccgccgcttacgaatgctaccagagggctgtggatataactcctgcaatagcattcaggctgatacaggtactgcggcaggagaatgtgcagtatgtggttgcaccatatgaagctgatgctcagttagtctttttagcactcaacagacacgtggattttgtcatcacagaagactctgatctaattgtatatggttgtccgcagatttttttcaagatggataaacatgggcaaggtgtggggtttcaaatctctgacattacggcgaataaagatatcgatctcagcgatttcacgaaacaaatgattcttgaaatgtgcataatgagcggttgcgattatttgccttctttgccaggaataggtgtgaaaagatctcatggcttaattaaacgtttcaggacctatcaaaaggcactgaagcatttggaggcgaaaggtgttcttatagatccacagtatgaacaaggtttccacagagcaattttgacgttccgacaccatcgtgtttacgatcctgtgaaaaaggagatggtgcacctcactggtgtaccgagtgaacttgacaccaacctagactttctgggaccatatcctcttgttgagattttcacaaaccggttttattacaattatgaggtttaa

SEQ ID NO: 761 - protein, 327 aa, Physcomitrella patens
MGIQGLLPTLKSIMHPRHAQEYAGKRAAIDTYSWLHKAVLSCSRDLCHGRHNDKYIDYCMRRVQMLRYYGVQPVLVFDGGSLPMKSDQEIKRARSRKENLERALEYERLGNHSAAYECYQRAVDITPAIAFRLIQVLRQENVQYVVAPYEADAQLVFLALNRHVDFVITEDSDLIVYGCPQIFFKMDKHGQGVGFQISDITANKDIDLSDFTKQMILEMCIMSGCDYLPSLPGIGVKRSHGLIKRFRTYQKALKHLEAKGVLIDPQYEQGFHRAILTFRHHRVYDPVKKEMVHLTGVPSELDTNLDFLGPYPLVEIFTNRFYYNYEV

SEQ ID NO: 762 - DNA, 2241 bp, Populus trichocarpa
atgggaatagaagggcttttacctctcttgaaatcaataatggtaccaatccatattaaggaattagagggctgttctgttgcggttgatacctattcttggcttcacaaaggtgccttgtcttgcagcactcagctttgcaaaggattacccacttccaggcacattgagtattgcatgcacagagtaaatttgctgcggcattatggtgttaagccaattttagtctttgatggaggtcttctgccaatgaagattgaacaagagaacaaacgtgcaaggacaagggaagagaaccttgtgcgtgctattgagcatgagtcaaatggaaattctgcagctgcttatgagtgctatcagaaggctgttgatatttccccttcaattgcacacgaactaatccaggtcttaaggcaggagaatgtatcatatgttgtggccccttatgaggcggatgcccaaatgaccttcttgtcggtatgcaaacaagtggatgcagttatcaccgaggactctgatctaataccttttggctgtcaccgaattattttcaaaatggacaagtatgggcaaggagttgagtttcagaattccaggcttcaacagaacaaggatataagttttgtgggtttcacaaacgaaatgcttcttgagatgtgcattttcagtggttgtgactatcaacaatcattaccaggaatgggactgaaaagggcacatgcattaattacaaagttcaaaagctatgacaaggtgatcaaacatttgagatatagcacagtgtctgttcctccactttatgaagaatcattcaagaaagcaatattgactttcaggcatcaacgtgtttatgatcctactatgaaagatattgtacatttgtctgacctgcctgacaatattggcaatgatttggaatttttgggcccattgataccgcaacagatagctacaggtatagcaagaggggatctggatccgtttactcaaatgccattccagttacagggagaaagtagcagttctgtgccggtacctaatgtaactcccaaatgcaaaaattataaactggaaagtggaaagaaaaagctagatttgcctgtccagaagaatctgctgactaagtacttctgcttttcatctctggaagcaaagagaaacttcagagcacctcagttgtcacctacaagtccaagtctagtgattcacacttcttcgagtcccagcaataatggtagtgaggaggctgcttcttgtaataccagctgctcttcagcatccttagttgtctctaagagtgacagaaacaacctccacagcaacaatgtggaaagttgttttccagatggagttcatgagtttatggagtctccaagtcctggcatggtggatgagaaggggcctcctgaaagtattttgctacaacaaattggtcattcaatgcgtggaccttgtcaagcattactaaaggagtgtaataatgagaacgctccaatttctgttgaggggaaaacaagaacagagaacaaaagggtcattgttaggagtcgtttcttccagcacaagtcaatgaacaagaatggccaagacaataaacacgaaatgatcagagtcaaggatgatgttgccagtgatacgtttgaagatagcatccttgagggatctgaaaatagaacagggaacagagagatcactataaggagctcttttttccagcacaagtcagttaatgagaatgatcaaggcaataaacaagaaaagctcttagaaagggatgattcagccaacaatatttataaagatttcattcttgagagcccttctgacaataaatgttcaaatggcatcatgatgaaaagaaagacatccccagatgacaatgttcaaagaaacatggaagtgaagcacatgcgcacagatgcatctcttcctgatgatggttgcgatcctcacctcaaggagacattagcagggacgaaacttgaggaacggaagtttggatctgacatttcacatataagccattattccaacatagcagagaaatcaatggaaagttttatttctgtgatatcttcatttagatacaactcatctggttctcgtgccagtggactgcgagcccctctgaaagacattcggaacacttgtaccaataggtcgaataatgccgttgattttagccaatttgcttacattccaaagaaccagaagaccacagtagcatctctaagacgctga

SEQ ID NO: 763 - protein, 746 aa, Populus trichocarpa
MGIEGLLPLLKSIMVPIHIKELEGCSVAVDTYSWLHKGALSCSTQLCKGLPTSRHIEYCMHRVNLLRHYGVKPILVFDGGLLPMKIEQENKRARTREENLVRAIEHESNGNSAAAYECYQKAVDISPSIAHELIQVLRQENVSYVVAPYEADAQMTFLSVCKQVDAVITEDSDLIPFGCHRIIFKMDKYGQGVEFQNSRLQQNKDISFVGFTNEMLLEMCIFSGCDYQQSLPGMGLKRAHALITKFKSYDKVIKHLRYSTVSVPPLYEESFKKAILTFRHQRVYDPTMKDIVHLSDLPDNIGNDLEFLGPLIPQQIATGIARGDLDPFTQMPFQLQGESSSSVPVPNVTPKCKNYKLESGKKKLDLPVQKNLLTKYFCFSSLEAKRNFRAPQLSPTSPSLVIHTSSSPSNNGSEEAASCNTSCSSASLVVSKSDRNNLHSNNVESCFPDGVHEFMESPSPGMVDEKGPPESILLQQIGHSMRGPCQALLKECNNENAPISVEGKTRTENKRVIVRSRFFQHKSMNKNGQDNKHEMIRVKDDVASDTFEDSILEGSENRTGNREITIRSSFFQHKSVNENDQGNKQEKLLERDDSANNIYKDFILESPSDNKCSNGIMMKRKTSPDDNVQRNMEVKHMRTDASLPDDGCDPHLKETLAGTKLEERKFGSDISHISHYSNIAEKSMESFISVISSFRYNSSGSRASGLRAPLKDIRNTCTNRSNNAVDFSQFAYIPKNQKTTVASLRR

SEQ ID NO: 764 - DNA, 558 bp, Populus trichocarpa
atgggtgtcaaagatctgctcaagttcatgaaaccctacattgaacctgttcacataaaaaaatataatggcaaacgtgtgggtattgatgcttatagttggctacataaaggagcttattcatgtagcatggagatttgtttaaattcaaatagcgaaaagaagttgcggtatttagactattttatgcacagaattaatctacttagacactacaagattacaccagttgttgtttttgatggtggaaatattccctgtaaagctggaactgaacaagacagatacaggaaaagaaaagcaaatcgtgagttggcaatggagaagctcaaagaagggaatgctaatgctgctactgaattttttcagagagcaattagcattaccccattgatggcacatcaactgattcagatcttgagatcggaaaacatagaatttttggtagctccatacgaggctgatgcacagttagcacatttagctagccttgaagcagaaagaggtggtatagcagctgttataacagaggacagtgatctattggcatatggttgc

SEQ ID NO: 765 - protein, 575 aa, Populus trichocarpa
MGVKDLLKFMKPYIEPVHIKKYNGKRVGIDAYSWLHKGAYSCSMEICLNSNSEKKLRYLDYFMHRINLLRHYKITPVVVFDGGNIPCKAGTEQDRYRKRKANRELAMEKLKEGNANAATEFFQRAISITPLMAHQLIQILRSENIEFLVAPYEADAQLAHLASLEAERGGIAAVITEDSDLLAYGCQATIFKMDRYGNGEEIVLDKVFDAAARKPSFQCFDKELFMGMCVLAGCDFLPSVPGIGISKAHSYVSKYRNLDRVLSVLKLEKGRQMPEDYSKSFIEALAVFQHARIYDSNNKRLEHMKPVPQNLLESLEGKLDFLGPEIPPSVATAIAEGNLDPTTMEAFACFRSPGRLPDPIFIQNPSQLQKPKANVVSRQMNSSMAFLSYKSEGDSVVLKQEPLSTESMYISEALALQKLISPPKVNITETAMVPNDVPLKVPKNPFRIQQVEEINLDQKDSSTGQISVVIDHEKMNIPWATPDDIQSEVHDKSPPKKRKLNKVHLDQGASITAQASVVTKAENSDNLCVAESQENVNSMPKMTSNGKGKNEKAKRSKHMSLENTKNTILNFFSRA

SEQ ID NO: 766 - DNA, 1293 bp, Saccharomyces cerevisiae
atgggaatacctggcttactgcctcaattaaagagaattcaaaaacaggtgtccctgaaaaaatacatgtatcaaacattagccattgatggttatgcgtggctacacagggcttcttgtgcgtgtgcttttgaacttgtgatgaataagccaacaaacaaatacttgcaatttttcattaaaaggctgcaactcctaaaacgccttaagatcaagccatatatagtttttgatggtgattccctttttgtgaaaaatcatacagaaactagaagaagaaagaaaaggttagaaaacgaaatgattgcaaagaaattgtggtcagccggcaacagatataatgcaatggaatattttcaaaaaagtgttgacatcacaccagaaatggcgaaatgtattattgattattgcaaactacattcaattccctacattgttgcaccatttgaagcagatccgcaaatggtttacttggaaaaaatgggccttatacagggtatcatatcagaagattctgatttgttggtctttggttgtaaaacactcataacaaagttaaatgatcagggaaaagctttagaaatctcaaaagacgatttttcagctttacctgaaaatttccctctaggagaattaagtgaacaacaatttcgtaatctagtttgtttagcagggtgtgattacactagcggaatttggaaagtgggtgtagtcactgctatgaagattgtgaaacggtattctgaaatgaaagacatccttatacaaatagaacggacagaaaaactttgtttcagtaaggcgttcaagcagcaggttgagttcgccaattatgcgtttcaataccaaagagtgttttgtcctctatcaaatcagattacaactttaaataatattcctaaagcagtcacaaattcccacgctgaaattattaaaattatgaaatgtattggttccgttgttgaaaggggatcaggggtacgaaaagatgtcattaatactaaaaatattgatcacaaagttcatgaaatgatagcaaaaggggagttgcaccctgtagatatggcttctaaacttattaatagagaaagaaaattaaaagcaagaaagctgtttaaagtaggtctacttgggggtgaatccaactcattcaataagaaagtggagcaaccgctagtggatacgcaggacgtgttatcggagagggagaattctcttgataacaaaaacgcatcctctatttatatgacctcaccagcagcgatctcaggcaccgtaccatcaattttctaa

SEQ ID NO: 767 - protein, 430 aa, Saccharomyces cerevisiae
MGIPGLLPQLKRIQKQVSLKKYMYQTLAIDGYAWLHRASCACAFELVMNKPTNKYLQFFIKRLQLLKRLKIKPYIVFDGDSLFVKNHTETRRRKKRLENEMIAKKLWSAGNRYNAMEYFQKSVDITPEMAKCIIDYCKLHSIPYIVAPFEADPQMVYLEKMGLIQGIISEDSDLLVFGCKTLITKLNDQGKALEISKDDFSALPENFPLGELSEQQFRNLVCLAGCDYTSGIWKVGVVTAMKIVKRYSEMKDILIQIERTEKLCFSKAFKQQVEFANYAFQYQRVFCPLSNQITTLNNIPKAVTNSHAEIIKIMKCIGSVVERGSGVRKDVINTKNIDHKVHEMIAKGELHPVDMASKLINRERKLKARKLFKVGLLGGESNSFNKKVEQPLVDTQDVLSERENSLDNKNASSIYMTSPAAISGTVPSIF

SEQ ID NO: 768 - DNA, 2109 bp, Saccharomyces cerevisiae
atgggtatccaaggtcttcttcctcagttaaagcccatacagaatccagtatcactacgtaggtatgaaggagaagtgttagccattgatggctatgcatggctacatagagcagcctgctcttgtgcttatgaacttgcaatgggaaaaccaactgataagtacctgcagtttttcataaaaagatttagtttattgaaaacctttaaagttgaaccgtatttggtcttcgatggtgatgccattccagttaaaaagtctactgaatctaaaagaagggataagagaaaagaaaacaaagccatagctgaaagactgtgggcctgtggcgaaaagaaaaatgctatggactattttcaaaaatgtgtcgacataacgcctgaaatggcaaaatgtatcatatgctactgtaagctaaacggtattcggtacatagtggctccgtttgaggctgactctcaaatggtatatttagaacagaaaaacattgtgcaaggaataatatccgaagattctgacctcctcgtcttcggatgtcgacgtctcattacgaagctgaatgattatggagaatgtttagaaatatgtcgcgataattttattaaactgcctaaaaagtttccgttgggatccttaactaatgaagaaatcataacaatggtttgtttatccggttgtgactatacaaatggaattcccaaggttggcctgattaccgcaatgaaattagttagaagattcaatactattgaaaggataattctgagtatacagcgggagggaaaactgatgataccagacacatacattaatgaatatgaagctgcagttttagcatttcaattccaaagggtattttgccctattcggaagaaaatagtgagcttgaatgaaattccgctgtacttgaaagataccgaaagtaaaagaaaaagactctacgcgtgcattggttttgtcatacacagagaaactcagaaaaagcaaattgttcatttcgacgacgatatagatcaccacttgcatttaaaaattgctcaaggtgacttgaatccatatgattttcaccaacctctagccaacagagagcacaaattacagctggcatccaagtcaaatatagagttcgggaaaactaatactactaattctgaagccaaagtcaaaccaatagaatcgttcttccaaaaaatgacaaaattggatcataacccaaaagttgcaaataacatccatagtctaagacaagcggaagacaaactgacaatggcaattaagcgtaggaaattaagtaatgccaatgtagtccaagaaacgttgaaggatacaagaagcaaattttttaataaaccctccatgactgttgtggaaaacttcaaagaaaaaggcgacagcatacaggattttaaagaggacacaaactcacaatctttggaagagcctgtttccgagtctcaactatctacacaaatacctagttcttttattacaaccaatttagaggatgacgacaacctgagtgaagaggtttctgaagttgtcagtgacattgaagaggaccgaaagaattctgaaggaaagactatcggtaacgaaatctataatacagatgatgacggtgatggcgatactagcgaggattatagcgaaactgcggaatcaagagttcccacgagcagcaccacctcatttcccgggtcatcccagaggagtatatcggggtgcacaaaagttttacaaaagtttagatattcatcttcattcagcggagttaatgcaaatagacaaccactatttcctcggcacgttaatcaaaaaagtagaggaatggtatacgtcaatcaaaatagagatgatgattgcgacgataacgatggtaaaaatcaaatcacgcaaaggccatcactgcgaaaaagccttattggtgccaggtcacagagaattgtgattgacatgaaaagcgtagatgaacgaaaatcattcaattcatcaccaattttgcatgaggaaagtaagaaaagggacatcgaaactactaagtcaagccaagctcggccggcagtcagatctatctccttgctttcccaatttgtttataaaggtaaataa

SEQ ID NO: 769 - protein, 702 aa, Saccharomyces cerevisiae
MGIQGLLPQLKPIQNPVSLRRYEGEVLAIDGYAWLHRAACSCAYELAMGKPTDKYLQFFIKRFSLLKTFKVEPYLVFDGDAIPVKKSTESKRRDKRKENKAIAERLWACGEKKNAMDYFQKCVDITPEMAKCIICYCKLNGIRYIVAPFEADSQMVYLEQKNIVQGIISEDSDLLVFGCRRLITKLNDYGECLEICRDNFIKLPKKFPLGSLTNEEIITMVCLSGCDYTNGIPKVGLITAMKLVRRFNTIERIILSIQREGKLMIPDTYINEYEAAVLAFQFQRVFCPIRKKIVSLNEIPLYLKDTESKRKRLYACIGFVIHRETQKKQIVHFDDDIDHHLHLKIAQGDLNPYDFHQPLANREHKLQLASKSNIEFGKTNTTNSEAKVKPIESFFQKMTKLDHNPKVANNIHSLRQAEDKLTMAIKRRKLSNANVVQETLKDTRSKFFNKPSMTVVENFKEKGDSIQDFKEDTNSQSLEEPVSESQLSTQIPSSFITTNLEDDDNLSEEVSEVVSDIEEDRKNSEGKTIGNEIYNTDDDGDGDTSEDYSETAESRVPTSSTTSFPGSSQRSISGCTKVLQKFRYSSSFSGVNANRQPLFPRHVNQKSRGMVYVNQNRDDDCDDNDGKNQITQRPSLRKSLIGARSQRIVIDMKSVDERKSFNSSPILHEESKKRDIETTKSSQARPAVRSISLLSQFVYKGK

SEQ ID NO: 770 - DNA, 1206 bp, Selaginella moellendorffii
atggggatccagggccttcttccggcgctcaaatccatcacgacatcgacgaatgtgaaagagtactcgggcatgagggtcgctgtagacacttactcgtggctgcacaaggccgcatttagttgtagcaaggacatttgcgatggtcgggcgacagccagctttctgaactactgcatgcaccgcgtgaatctcttgcgacaccatgggatcaaacctttgctggttttcgatggaggctcattgccaatgaaagccgagcaagaagaaaagcgctccagagccagggaagagcatctaaagctcgctcgtgaatgcgaagcatctggaaatcatgctgcagcctacgatcactatcaaaaggcagtagacattactcccgaagttgcgcaccagcttatcctggtccttcgcagagaaaatgtggaatacattgtctctccgtatgaagccgatgcacagatggcctttctggcactgcgcggtgttgtcgacgctgtaatcactgaagactcggacctggttgcgtacggttgtccaaagatccttttcaaaatggacaagaatggtcaaggttttgagcttcagtatgctgacctggtgaagaacagggacttgaatctgacgagtttcacaaagaggatgatgctggaaatgtgcatccttagtggctgcgactacttgccatctttgcaaggcatgggagtgaaaagagctcataatttaatccgcagatttcgaagctacgagaaggtgattagacacttgaaattttcgggcgtaatgataccgaagtcttacgaagaaggcttcagaaaggcattgcttactttttgtcatcaccttgtctatgatcctacgcaagatgaattggtgcaccttactgaacttcccgccgactgcagcgaagaggtggagtttctcggaccatatccttttaaaagtctatgcattctacactcggaacttaactccgacaaacaaagctttcccgaagtctcgtgcagcagattgtccgaggcgtcatacatccggaaactcatgctccacttcaggtatactaggctttgtattgtcccgtatgctaatcaccgtgtgctaacaagcttgctgagccgccacagtctttatgcgaagatagaaagccaattgcaaaacaaaaagaacaaaagcgtctcaacttacctgcgcagaggaatgtgctga

SEQ ID NO: 771 - protein, 401 aa, Selaginella moellendorffii
MGIQGLLPALKSITTSTNVKEYSGMRVAVDTYSWLHKAAFSCSKDICDGRATASFLNYCMHRVNLLRHHGIKPLLVFDGGSLPMKAEQEEKRSRAREEHLKLARECEASGNHAAAYDHYQKAVDITPEVAHQLILVLRRENVEYIVSPYEADAQMAFLALRGVVDAVITEDSDLVAYGCPKILFKMDKNGQGFELQYADLVKNRDLNLTSFTKRMMLEMCILSGCDYLPSLQGMGVKRAHNLIRRFRSYEKVIRHLKFSGVMIPKSYEEGFRKALLTFCHHLVYDPTQDELVHLTELPADCSEEVEFLGPYPFKSLCILHSELNSDKQSFPEVSCSRLSEASYIRKLMLHFRYTRLCIVPYANHRVLTSLLSRHSLYAKIESQLQNKKNKSVSTYLRRGMC

SEQ ID NO: 772 - DNA, 1056 bp, Volvox carteri
atgggaataaatggcctattacagcaattgaaaagcatatcaaggcccacgcatgtgagctcataccgtggacagaaggtggccatagatggttactcgtggctccacaagggtgcttacagttgcagccgcgagctatgcgaaggaatctgggccgatggatataccaggtactttatttcgcgaatcgacatgctcctgggcaacggagtcattcctatcgtcgttttcgacgggtgccgcctccccatgaaggctgacgaggaggatagccgtagaaggagccggcgagaggccctagagcgcgcccggacccactccgcctcgggcaacatggctgcggccacggagtgctaccagcgggctgtggacattgcgccgtggatggccaaggtcgtcatggaggccctccgcgaacgccaggtgacgtgcctggtggcgccgtacgaagccgacgcgcagatgtcgtacttggcgctgcgtggcgacgtgcatgctgtgctgacagaggacagtgacatgttggcgtacggctgcccccgggtgctgtacaagttggaccgcggtggttcgggggaggaggtgatgctgtcggatcttcctttggttcgggaaatcaacatggcgggtttcaaccacgacatgctgctgcagatgtgcatcctggcgggctgtgacttcttgcccaacatacctggggtgggcatcaagaaggcgcatgccatgatccgcaagcaccgagatttcgtcaaggtcgtccgcaacctgcatttcaacggcacctctccgcctcctggctacgagatccgcttccagcgtaccctctggctcttccgccaccagcgggttttttgtcccatcgcgcgtgcgctgacgcacctgcgtccgctgccgcctggcggcttgggcgccgcagatgttctggtgctggcggcgttgccgcctgagggcccggagcgcgaggcgcttcatttccttgggccgcccatggcagccgaggtggcgactgggattgcgatgggtgggtgcagggttgtgcggtgccgtgccgtgtga

SEQ ID NO: 773 - protein, 351 aa, Volvox carteri
MGINGLLQQLKSISRPTHVSSYRGQKVAIDGYSWLHKGAYSCSRELCEGIWADGYTRYFISRIDMLLGNGVIPIVVFDGCRLPMKADEEDSRRRSRREALERARTHSASGNMAAATECYQRAVDIAPWMAKVVMEALRERQVTCLVAPYEADAQMSYLALRGDVHAVLTEDSDMLAYGCPRVLYKLDRGGSGEEVMLSDLPLVREINMAGFNHDMLLQMCILAGCDFLPNIPGVGIKKAHAMIRKHRDFVKVVRNLHFNGTSPPPGYEIRFQRTLWLFRHQRVFCPIARALTHLRPLPPGGLGAADVLVLAALPPEGPEREALHFLGPPMAAEVATGIAMGGCRVVRCRAV

SEQ ID NO: 774 - DNA, 2024 bp, Saccharomyces cerevisiae
atgggtgtgcattcattttgggatattgcaggtcctacggcaagaccggtcaggctggaatccttggaagataagagaatggcagtagatgcctccatttggatatatcagtttttgaaagctgtccgtgatcaggaggggaatgcagtgaagaattctcatattactgggttctttagaagaatttgtaagctattatactttggcattaggccggtattcgtctttgatggtggtgtgcccgtattgaaaagggaaacaatacggcagaggaaagaaagaagacagggaaaacgagagagtgcgaaatccaccgctaggaagctgctggctttacaattgcaaaacggctcaaacgataacgtaaaaaactctacaccgagtagtggcagtagtgtgcagatcttcaaacctcaggacgagtgggacttgcccgatataccgggattcaaatacgataaggaagatgcaagagttaactctaataaaacttttgaaaaactgatgaattcgataaacggtgatggactggaagacattgatttagacactataaatccagcatcggccgaatttgaagagctgccaaaggccacacagtatttgatattatcgtcgttgaggttgaaatcaagactgaggatgggatactcgaaagaacaattggagaccatcttcccaaatagtatggatttctcaagatttcaaatagacatggtgaaaaggaggaatttttttactcaaaagttaatcaacactactgggtttcaggatggtggagcgtctaagctgaacgaggaggtgatcaataggatatccggccaaaagagtaaagagtacaagttgactaagactaataacgggtggattcttggactaggggcaaacgatggctctgatgcgcaaaaagcaatcgtaatagacgataaagatgcaggcgctttggtaaagcagttagatagtaatgctgaggacggggacgtgctccgatgggatgatttggaagataattccttaaaaatagtgcgacatgagtcttctaacgcgacgacagctccacagaaaaggagtaaccggtcagaagatgagggatgtgactctgatgaatgtgagtgggaagaagttgaactcaagcccaagaacgtcaagtttgtggaagatttttctttgaaagctgcaaggttgccttacatgggccaatccctaaacaacgctggcagtaaatcgtttttggacaaaagacatgatcaggcatcgccctccaagactactccaacaatgagaattagcagaatcagcgtggaagacgacgatgaggattacctgaaacaaattgaggaaattgaaatgatggaggcagtgcaactttctaagatggaaaagaaacctgaagcggacgacaaatcaaaaatcgctaagccggtaacgtcaaaaggtacagaggctcgtccaccaatagtacagtatggattacttggcgcacaaccggatagtaagcaaccgtatcatgtcacaaatttgaatagcaaatcagagtcggtcatcaaaaggaccagcaagacagttctttctgagtttaggccaccgtctcagcaggaggataaaggggctattttaacagagggggagcaaaacctgaattttatttctcacaagataccacagtttgattttaacaatgaaaattccctgctttttcaaaagaataccgagagtaatgtgtcccaagaagccacgaaggaaaagtctccaattcctgaaatgccgagctggttttcttcaactgcttcccagcagttgtataatccctataacacaacaaatttcgtggaagataaaaacgtaagaaatgaacaagaaagtggagcagaaactaccaataaagggagtagctatgaactcttgacaggcttaaatgctacggaaatattagaaagagaaagcgagaaagagagctccaatgatgaaaacaaggacgatgacttagaagttttatcagaagaactatttgaggacgttcccac

SEQ ID NO: 775 - protein, 1031 aa, Saccharomyces cerevisiae
MGVHSFWDIAGPTARPVRLESLEDKRMAVDASIWIYQFLKAVRDQEGNAVKNSHITGFFRRICKLLYFGIRPVFVFDGGVPVLKRETIRQRKERRQGKRESAKSTARKLLALQLQNGSNDNVKNSTPSSGSSVQIFKPQDEWDLPDIPGFKYDKEDARVNSNKTFEKLMNSINGDGLEDIDLDTINPASAEFEELPKATQYLILSSLRLKSRLRMGYSKEQLETIFPNSMDFSRFQIDMVKRRNFFTQKLINTTGFQDGGASKLNEEVINRISGQKSKEYKLTKTNNGWILGLGANDGSDAQKAIVIDDKDAGALVKQLDSNAEDGDVLRWDDLEDNSLKIVRHESSNATTAPQKRSNRSEDEGCDSDECEWEEVELKPKNVKFVEDFSLKAARLPYMGQSLNNAGSKSFLDKRHDQASPSKTTPTMRISRISVEDDDEDYLKQIEEIEMMEAVQLSKMEKKPEADDKSKIAKPVTSKGTEARPPIVQYGLLGAQPDSKQPYHVTNLNSKSESVIKRTSKTVLSEFRPPSQQEDKGAILTEGEQNLNFISHKIPQFDFNNENSLLFQKNTESNVSQEATKEKSPIPEMPSWFSSTASQQLYNPYNTTNFVEDKNVRNEQESGAETTNKGSSYELLTGLNATEILERESEKESSNDENKDDDLEVLSEELFEDVPTKSQISKEAEDNDSRKVESINKEHRKPLIFDYDFSEDEEDNIVENMIKEQEEFDTFKNTTLSTSAERNVAENAFVEDELFEQQMKDKRDSDEVTMDMIKEVQELLSRFGIPYITAPMEAEAQCAELLQLNLVDGIITDDSDVFLFGGTKIYKNMFHEKNYVEFYDAESILKLLGLDRKNMIELAQLLGSDYTNGLKGMGPVSSIEVIAEFGNLKNFKDWYNNGQFDKRKQETENKFEKDLRKKLVNNEIILDDDFPSVMVYDAYMRPEVDHDTTPFVWGVPDLDMLRSFMKTQLGWPHEKSDEILIPLIRDVNKRKKKGKQKRINEFFPREYISGDKKLNTSKRISTATGKLKKRKM

SEQ ID NO: 776 - DNA, 1803 bp, Arabidopsis thaliana
atgggagtgaagtatctttgggatgtcttggagccttgtaagaagactttcccactcgatcatcttcaaaacaaaagggtatgcgtggatctttcgtgttggatggtggaattgcataaagtgaacaaatcttattgcgccactaaagaaaaagtttatcttcgaggattttttcatcgtctccgagccctaattgccctaaactgctccatcattttagtctcagatggtgcaattcctggaatcaaagtaccaacttacaagcgtcggttaaaagcaagattcgagatcgctgacgatggtgttgagcctagcaaagagacttcactcaaaagaaatatggggtctgagttctcgtgcatcataaaagaggcgaaagttattgcatcaacactagggatactttgtttagacgggattgaggaggctgaggcgcaatgcgctctgctaaactcggaatccttatgtgacgcctgttttagctttgattcggatatcttcctttttggtgcaaagactgtatacagagaaatatgccttggtgaaggaggttatgttgtttgctacgagatggatgacatcaagaaaaagcttgggcttggacggaactcattgatagctctagcgcttttgcttggcagtgactactctcagggagttcgtggtcttcgacaggagaaagcttgtgagcttgttaggtcgattggagacaatgttatccttgaaaaagttgcatcagaaggactttcctttgcggaaaagccgagaaagtctaagaagcaagttaggccttctgtgtgcagcaaaaaggggaccttacctttggtggttataaatggaaataatcgtgatccagaaagactggaagagatcaagcaggtgatcgatgcgttcatgaaccccaagtgccaccaagcagactctaatacagtttccagggccttagctgaattctctttccagcgcaccaagcttcaggagatatgccatcagttctttgagtggccccctgagaaaacagatgaatacatacttcctaaagttgctgaaagaaatctgagaaggttcgctaatctgcaatcaagatcaactgaggttgaagttaaccttcctctccacaagccgcagatgccagagaagtgtccggtgtctgaaatcataaagacccgaaaagtacaggggcgagaatgttttgaagtctcatggaatgatctagaagggttagagtcgtccattgttcctgcagatcttgtagaaagggcttgtcctgagaagatcatagagttcaaggagaaaatggcagcaaaaaagaagaaaccgaagccgaaacaaaaacagaaggaaacgagttcaccgaccaaatcttcttctcttgtcgaactcagcctcgaactccaacaccttgatctcaactcaacctctctagtaagtagaagcaccttagaagaagcagagcaagagaacgaacaacaaaactccaagaaacatgattacttgcgtcttatcgattcacctgatagagaaaattgcaataacgcttggtcaaacagggatagattgggtgttggaatgagttcatttccattgtatccggaaacagaagtcattgatctgataagcccttgtcctgaagctcgttcacggagcgtgtcaagaagttatcaagaacagaagagccatgatcaccaacttgagactgtgattgagctgagtgattcagagacagatgatgaggaacattgcaagaaagctagagagcttaggatctttcttcaaaatatcaggaaagacattatcctatga

SEQ ID NO: 777 - protein, 600 aa, Arabidopsis thaliana
MGVKYLWDVLEPCKKTFPLDHLQNKRVCVDLSCWMVELHKVNKSYCATKEKVYLRGFFHRLRALIALNCSIILVSDGAIPGIKVPTYKRRLKARFEIADDGVEPSKETSLKRNMGSEFSCIIKEAKVIASTLGILCLDGIEEAEAQCALLNSESLCDACFSFDSDIFLFGAKTVYREICLGEGGYVVCYEMDDIKKKLGLGRNSLIALALLLGSDYSQGVRGLRQEKACELVRSIGDNVILEKVASEGLSFAEKPRKSKKQVRPSVCSKKGTLPLVVINGNNRDPERLEEIKQVIDAFMNPKCHQADSNTVSRALAEFSFQRTKLQEICHQFFEWPPEKTDEYILPKVAERNLRRFANLQSRSTEVEVNLPLHKPQMPEKCPVSEIIKTRKVQGRECFEVSWNDLEGLESSIVPADLVERACPEKIIEFKEKMAAKKKKPKPKQKQKETSSPTKSSSLVELSLELQHLDLNSTSLVSRSTLEEAEQENEQQNSKKHDYLRLIDSPDRENCNNAWSNRDRLGVGMSSFPLYPETEVIDLISPCPEARSRSVSRSYQEQKSHDHQLETVIELSDSETDDEEHCKKARELRIFLQNIRKDIIL

SEQ ID NO: 778 - DNA, 1926 bp, Oryza sativa
atgggggtgaagaacctgtgggacatcctggagtcgtgcaagaagaagctcccgctccaccacctccagaacaagaaggtgtgcgtggacctgtcgtgctggctggtccagatgtacagcgccaaccgctcgccggccttcgccaaggacaaggtctacctcaagaacctcttccaccgcatccgcgccctcctcgccctcaactgcaccctcctcttcgtcaccgatggggctataccttcacttaagttggccacttaccgccgtcgcctcggatccatttctcatgctgctaaagaatcagatcagcccaattcacacccatccatttcactgcgtcgcaacaagggttccgagttctcctgcatgattaaagaggccaagcgtctcggcatggccctcggcatcccttgcttggacggattggaggaggctgaagcacagtgtgcatccctagatctagagtcactctgtgatggctgtttcacttcagactcggatgcttttctttttggcgctaggactgtttatagagatgttttcataggggagggtggctatgtcatttgctatgaaatggaagacatagagaaaactcttggctttggcaggaactcgctgatatcacttgcagtgctccttggtagtgattattctaatggagttaatgggtttggcccagaaacagcatgccggcttgttaagtctgtaggcgacaatttaattcttgatcagattttgtctaatggagttaaagctactagaaaatgtaaagggaaaaatagtggaaacaaggtggacgacatgtgccccaaagcaagttcctgcgaggttggcatgactcaagactctgatggtcaatttcgtgacgtcataaatgcatatctggagccaaaatgtcactcacctgattcggaagctgtgcagagggtatgcggacagcacccatttcttcggccacagcttcaaaaaatatgcgaggaatattttgattggagtccagagaaaactgatcaatatatacttccgaagattgctgagagagaacttcggaggttttcagaccttcgctctgcgtcttcagcactaggaataaaacctttgttgagtgagataccagtaccatgccctgtactggcgattgtgaagcagaggaaagttcatgggaatgaatgttatgaggtttcatggagaaatatagaagggctccaagtttcagtagtccctggggatcttgttaaaagtgcgtgcccggagaaaataacagaatttttggagaagaagggtgaagagaagaagcagaagaggagagcaaggccaaagaaatcagggcaggctgcagtgaaagatgttgatgaacagctccaagagttgctgcttggtattgaagctgatagtggtggcatattgggtgctacagccagtgtgtgtcagactctgacagcagcctacactgtggctgtggaagatgtagttgatctgtcgtctccttctcctcctcttcggaagctctccaagtcccaaaagaagatgatggccgaggatgtcaatgtggctggtatgaacatgaacaagatggagtcagaaagtagttttagcacgcaatcaagtactagtgatgttgacaaccagctgattgatctgtcttcacccctggctggtggtgataatggtatgaaaggtggaagaagagccctggcagacataagcaatgttggttcacacagcactgagacagacggaggaggaggaggtggtggtggtgtggcatcggtcggccatggaaccaccatcgacctatcttctccgtcgccggccataggcgacagatcaagggttcatcacgatgatgatgatgtaatacacgagaggaaagcaagggacctgagaatgttcctggacagcatacggaacgagctgtattga

SEQ ID NO: 779 - protein, 641 aa, Oryza sativa
MGVKNLWDILESCKKKLPLHHLQNKKVCVDLSCWLVQMYSANRSPAFAKDKVYLKNLFHRIRALLALNCTLLFVTDGAIPSLKLATYRRRLGSISHAAKESDQPNSHPSISLRRNKGSEFSCMIKEAKRLGMALGIPCLDGLEEAEAQCASLDLESLCDGCFTSDSDAFLFGARTVYRDVFIGEGGYVICYEMEDIEKTLGFGRNSLISLAVLLGSDYSNGVNGFGPETACRLVKSVGDNLILDQILSNGVKATRKCKGKNSGNKVDDMCPKASSCEVGMTQDSDGQFRDVINAYLEPKCHSPDSEAVQRVCGQHPFLRPQLQKICEEYFDWSPEKTDQYILPKIAERELRRFSDLRSASSALGIKPLLSEIPVPCPVLAIVKQRKVHGNECYEVSWRNIEGLQVSVVPGDLVKSACPEKITEFLEKKGEEKKQKRRARPKKSGQAAVKDVDEQLQELLLGIEADSGGILGATASVCQTLTAAYTVAVEDVVDLSSPSPPLRKLSKSQKKMMAEDVNVAGMNMNKMESESSFSTQSSTSDVDNQLIDLSSPLAGGDNGMKGGRRALADISNVGSHSTETDGGGGGGGGVASVGHGTTIDLSSPSPAIGDRSRVHHDDDDVIHERKARDLRMFLDSIRNELY

SEQ ID NO: 780 - DNA, 1779 bp, Populus trichocarpa
atgggagtgaagaacttatgggacatcttagaatcatgcaagaagaccctgccgcttcaccatctccagaacaaaagggtttgtatagatctgtcttgttggatggttcaactccaaaatgtaaacaaaacacactgcggattggttaaagacaagccctatattaggaatctgtttcatcgcctaagagctctcattgctttgaattgcagccttatttttgttgctgatggatcaatccctgctatcaaattagccacttaccgtcggcgcttgaatttaggacttgaggttacccaagatgaaacaaattcacaaaaagcttgctcacttcggagaaacatgggatcagagttctcatgcatgatcaaagaagcaaaagatattggattagcacttgggatcccttgcttagatagcattgaggaagctgaagcacagtgtgcattgttaaacacagaatcattgtgtgatggttgtttcagctcagattcagatgtcttcctttttggtgcaaggaccgtgtacagagacatatgtcttggagaaggacatgttgtttgttatgaaatggaagaagtagaaagaaaacttgggtttgggaggaactcgttgatcacgctagcccttatacttggaagtgattactctccaggagtgcatggcctaggtccagagtcagcatgccaaattgtcaagtcaattggagatagcaatgtccttcaaaaaattgcatcagagggactgccctttgcaaagaagataaaaacttcaaagaagcagatgcgcagtaaaaaaacaaactctctggattctgaaatccattttaatggaagcgataacaattcagaaaggaagaatgagtgcttgcaagtgattaatgcatatctgaagcccaagtgccacccagcagattctgatgcagcctgtagggttctttctcagcatccatttcaacgtctcaaacttcaagggatatgtgctcagttctttgggtggcctccagagaaaacagatgagtacacccttccaaaaattgctgaaagagacttgcggagatttgccaatctgcgatcaacttcatcagagttaggagttaatcttcctctgcaaaagttatcttgtacacaactagctaaaccttctcaatggcagataccagttaagtgccctgtatctggagttgttaaacagagaaaggttcagggaacagaatgctttgaggtgttgtgggaagggtttgatggacttaaaacctccatagttccagcagatctcttagagagtgcttgtccggaaaagattgcagagtttgaggagaaaacagctttgggaaagaaacaaaatcaacgcaaacctggatcaaagaaatcaggaaacaggcttgctatggccgaaattgatttaaaactccaaactttgctgcttgacattgaaccaggaagcaatactgcctgtagcacctccttgtcatcaaaagcagcaatttcagaagataggactacttcaactgcggctagtcatacaaaactagatccacgtaatgctggttgtagagctgccttgtttactgataccagtcagtatgaggtcattgatctctgtagcccctctcccgtagcccgaactcgtactgtttcaagatgtcaacgagtgaatgatcaacatagtgaggtgatagatttgagtgaatcagagaatgaaatgtcacctgaacatgcaaggaaggcaagagcgcttagaatgtttatagccagtattagggatgatatgtcatga

SEQ ID NO: 781 - protein, 592 aa, Populus trichocarpa
MGVKNLWDILESCKKTLPLHHLQNKRVCIDLSCWMVQLQNVNKTHCGLVKDKPYIRNLFHRLRALIALNCSLIFVADGSIPAIKLATYRRRLNLGLEVTQDETNSQKACSLRRNMGSEFSCMIKEAKDIGLALGIPCLDSIEEAEAQCALLNTESLCDGCFSSDSDVFLFGARTVYRDICLGEGHVVCYEMEEVERKLGFGRNSLITLALILGSDYSPGVHGLGPESACQIVKSIGDSNVLQKIASEGLPFAKKIKTSKKQMRSKKTNSLDSEIHFNGSDNNSERKNECLQVINAYLKPKCHPADSDAACRVLSQHPFQRLKLQGICAQFFGWPPEKTDEYTLPKIAERDLRRFANLRSTSSELGVNLPLQKLSCTQLAKPSQWQIPVKCPVSGVVKQRKVQGTECFEVLWEGFDGLKTSIVPADLLESACPEKIAEFEEKTALGKKQNQRKPGSKKSGNRLAMAEIDLKLQTLLLDIEPGSNTACSTSLSSKAAISEDRTTSTAASHTKLDPRNAGCRAALFTDTSQYEVIDLCSPSPVARTRTVSRCQRVNDQHSEVIDLSESENEMSPEHARKARALRMFIASIRDDMS

SEQ ID NO: 782 - DNA, 2097 bp, Sorghum bicolor
atgggggtgaagaacctctgggacatcctcgactcctgcaagaagaagctcccgctccagcacctccagaacaagaaggtgtgcgtggatctttcctgctggctcgtgcagttctgcagcgccaaccgctccccggccttcctcagggataaggtctacctcaagaacctcttccaccgtatccgagccctcctcgccctcaactgcagcctcatctttgtctcagatggggcgattccttcagtcaaattggctacttataggcgccgcctgggattaaatgctgctgaggctactcgagaggaggccaactcacaacctctgacttctttgcgccggaacaagagctcagagttctcacgcatgatcaaagaagccaagcatctcgggttggcccttggcatcccctgcttggatggtgtggaagaggcagaggcacagtgtgcaatgcttaattttgcctccttgtgtgatggctgttttacatcggattccgattcattcctgtttggtgcaaggacagtttatagagatgttttcataggagagggtggttatgtaatttgctatgaaatggaagacattcagaagaagcttggtttcggcaggaactcactgatatcacttgcagttcttcttggcagtgactattctaatggagtccatggctttggcccagaattagcatgccgccttgttaaatctgtgggggatgatgccattcttgatcaaattttgtccgatggagttaaacctgcaaggaaatgtaaaggaaaaaatagtggtgccattgcagggagggttggtggaacatgcccaaaagcgagtacctgtgaggttgggattaaccaagattctggtggtcaatttcgtgacataataaatgcatatctggagccaaaatgtcattcaccagattcagaagccgtgcagagggcatgcagtcagcagccatttcttcggtcacagctgcaacagatatgtgagcaatactttgagtggagccctgtgaaaactgatgaatatatccttccaaagattgctgagagagaacttcgaagattttcaaatctccgctccacgtcttcagatctaggaataaaaccttcactggatgagatgccagtaccgtgccctgtactggcaattgtgaagcagcgaaaagttcaaggaagtgaatattatgaggtttcatggagaaacatagatgggctccaagtttcagttgttccaggggatcttgttagaagtgcttgcccagaaaaaataactgtctttttggaaaacaaggatgctcagaagaagcaaaagaggagagctaggccaaagaaatcaggtcaagctgctgctgccttaaaagacgtggatgcgcagctccaagaattgctacttggaattgaatctgaaagcagtacatttccatgtacagccaatggccctcagactcagacagcagatatgcagatggtggcaccgctccaggattttgttgatctgtcttctccatcaccacctatacgatcttgtaagatggccagatccagaaagttcagtgattcagacgcagtaaccatgggtcagattgatctgcagcaccaaaatctgctgattggatcaatggagtcaaattcgacactagatcatgagccaattgatctttcatcaccctcgccttgcgctgctcataaaccccaggcagctccagaaggaccgccactgtgtatggaagcagaaagaagagccctctgggatataagcaatttgcccgagaaagaaccctcctgttgcaagcatgaacctggaacaagtggctgtgatgtgcaggtggaagaatcaccattgttcaggcatgggactgggatggcaggcaaagctgattcctcacagaggagcgatggacaaagtagtgaagtagtagaacccaccatgatcgatctctcttctccttcaccggttaaagtggataagagtagacggaatggccagaagcctgaccaggattgtgaggctgatgatggcagtcagtctccagaacacgagaggaaagcgagggagctcagattgtttctaaacagtataagagacgagctaaactaa

SEQ ID NO: 783 - protein, 698 aa, Sorghum bicolor
MGVKNLWDILDSCKKKLPLQHLQNKKVCVDLSCWLVQFCSANRSPAFLRDKVYLKNLFHRIRALLALNCSLIFVSDGAIPSVKLATYRRRLGLNAAEATREEANSQPLTSLRRNKSSEFSRMIKEAKHLGLALGIPCLDGVEEAEAQCAMLNFASLCDGCFTSDSDSFLFGARTVYRDVFIGEGGYVICYEMEDIQKKLGFGRNSLISLAVLLGSDYSNGVHGFGPELACRLVKSVGDDAILDQILSDGVKPARKCKGKNSGAIAGRVGGTCPKASTCEVGINQDSGGQFRDIINAYLEPKCHSPDSEAVQRACSQQPFLRSQLQQICEQYFEWSPVKTDEYILPKIAERELRRFSNLRSTSSDLGIKPSLDEMPVPCPVLAIVKQRKVQGSEYYEVSWRNIDGLQVSVVPGDLVRSACPEKITVFLENKDAQKKQKRRARPKKSGQAAAALKDVDAQLQELLLGIESESSTFPCTANGPQTQTADMQMVAPLQDFVDLSSPSPPIRSCKMARSRKFSDSDAVTMGQIDLQHQNLLIGSMESNSTLDHEPIDLSSPSPCAAHKPQAAPEGPPLCMEAERRALWDISNLPEKEPSCCKHEPGTSGCDVQVEESPLFRHGTGMAGKADSSQRSDGQSSEVVEPTMIDLSSPSPVKVDKSRRNGQKPDQDCEADDGSQSPEHERKARELRLFLNSIRDELN

SEQ ID NO: 784 - DNA, 1695 bp, Vitis vinifera
atgggtgtgaaaaacctctgggacatcttggaatcttgcaagaaaactctcccactttaccacctccagaacaagagggtgtgcatcgatctttcatgttggatggttcaacttcaaaatgtaaacaaatctcatgcttcaatcaaggacaagctttatctcaaaggcctctttcaccgtcttagagctctcattgctttgaattgtagccttctttttgtcacagatggatcaatccctgcaatcaaactagccacttacagacggcgcttaaattcaggaactgaggtcactcgagatgaaacaaactcccataatgtgccttcgctccggagaaatatgggatctgaattctcatgtatgataaaggaggcaaaagtccttggcttggcacttggtatcccttgcttagatgggattgaagaagctgaagcacagtgtgcattgttaaactcagaatcattatgtgatggatgtttcacttcagattcagatgttttcctttttggtgcaaggacagtttacagagacatttgccttggggaaggcggttatgttgtttgttatgaaatggcagacatagagagcacacttgggtttggaaggaactccttgattactctggcacttcttcttggtagtgattactctcagggagttcatgggtttgggccagagtcagcatgccagattgttaaatcagttggtgaagaagttgttctcaaaaaaattgcattagaagggatatcctttgcaaagaaatcaaagggttcaaggaaacaggggcaagttcttaagtgcaatgacaaagagaattgttcagaccatgaaatgaacattaatggatctgagcatagttcacaaagggagttcttgcgagtaattgatgcttatttgaaaccaaaatgtcactctgcagactctgatgcagtgcatagggctcttgctcttcttccatttcaacgcactgaagctcagaagatatgtgctcagttgtttgagtggcctcctgagaaaacaggtactttcttcctcaaaatttttactttatacttgcggcgatttgccaatttgcgttcaacttcttcaaacttgggaattcattttccgttgcacgagataccagtaaaatgccctatttctggaattataaagcacagaaaagtccaaggaagagaatgctttgaggtttcctgggaagagtttgatggccttaaatcctccataataccagcagagcttgtgaagagtgcttgtcctgaaaagattgtggagtttgaagggagaaaaccccaagagaagaaacaaaatcatcgtaaaccaaggccaaagaaatccaataacagaactcccttggctgagattgataaacaactccaaaatctattgcttgatatagaatcaggaggcaattcttttcaaaatgtttcattttcttcaagcatgacaccatccaaaacccaaattgatgcaaccaaagcagcaaaaacacaatatatgttgcttgatacagagtcagagagcgacaatgacaatcacaatgaagccataatttgccatcagaatggtcgatgcggtgctgaaatagtcattgatctgctaagcccttccccagcaatacgtgcccgaaaggtttcgaagtgccaacaaggcaataatggccaacaaattgatgtaattgatttgagtgattga

SEQ ID NO: 785 - protein, 564 aa, Vitis vinifera
MGVKNLWDILESCKKTLPLYHLQNKRVCIDLSCWMVQLQNVNKSHASIKDKLYLKGLFHRLRALIALNCSLLFVTDGSIPAIKLATYRRRLNSGTEVTRDETNSHNVPSLRRNMGSEFSCMIKEAKVLGLALGIPCLDGIEEAEAQCALLNSESLCDGCFTSDSDVFLFGARTVYRDICLGEGGYVVCYEMADIESTLGFGRNSLITLALLLGSDYSQGVHGFGPESACQIVKSVGEEVVLKKIALEGISFAKKSKGSRKQGQVLKCNDKENCSDHEMNINGSEHSSQREFLRVIDAYLKPKCHSADSDAVHRALALLPFQRTEAQKICAQLFEWPPEKTGTFFLKIFTLYLRRFANLRSTSSNLGIHFPLHEIPVKCPISGIIKHRKVQGRECFEVSWEEFDGLKSSIIPAELVKSACPEKIVEFEGRKPQEKKQNHRKPRPKKSNNRTPLAEIDKQLQNLLLDIESGGNSFQNVSFSSSMTPSKTQIDATKAAKTQYMLLDTESESDNDNHNEAIICHQNGRCGAEIVIDLLSPSPAIRARKVSKCQQGNNGQQIDVIDLSD

SEQ ID NO: 786 - DNA, 1713 bp, Arabidopsis thaliana
atgggtgtgggaggcaatttctgggatttgctgagaccatatgctcagcaacaaggctttgattttctcagaaacaaacgagtcgctgttgatctctccttctggatcgttcagcatgaaaccgctgttaagggtttcgtccttaaacctcacctccgactcactttcttccgtactatcaacctcttctcaaagtttggagcgtacccggtttttgtggttgatggaacaccatcacctttgaaatctcaggcgagaatctccaggtttttccgttcttctggaattgatacttgtaatctacctgtgattaaagatggtgtctcggttgagagaaacaagctgttttctgaatgggttagggaatgtgtggagctactcgaattgctcggtattccggtgctgaaagctaatggtgaggctgaagctctctgtgcacagttaaacagccaaggttttgtggatgcttgcattactcctgatagtgatgctttcctttttggtgctatgtgcgtgatcaaagacatcaagcctaattcaagagaaccttttgaatgctaccatatgtcacatatcgagtctggcctcggtttgaagcggaaacacttgattgctatttctctattggtgggaaacgattatgattcaggcggtgttcttgggattggtgtggataaagcactgcgcattgttcgtgagttttctgaagaccaagtacttgaaagactacaggacattggaaatgggttgcaacctgcagttcctggtggaatcaaatccggggatgatggtgaagaattccgctcagagatgaaaaaaagatctcctcactgttcccgttgtggacacctgggcagcaagagaactcattttaagtcctcttgtgagcactgcggttgtgatagtggttgcattaaaaaaccattagggtttagatgtgaatgctccttttgttccaaggatcgagatttaagggaacaaaagaaaaccaatgattggtggatcaaagtctgcgataagattgctctagcgccagagtttcccaacagaaagattattgaactttatctatccgatggtttgatgacaggagatggatcgtcaatgtcttggggaactcctgatactggaatgctagtggatctcatggttttcaaactgcactgggacccatcttatgttagaaaaatgttgcttccgatgctgtcgaccatttatctgagagaaaaggcaagaaacaacacaggatacgctttgttgtgtgatcaatacgaatttcattcaatcaacgagccagaagaatcaattgttgtattggaagaagaagaagagtctgttgatccgttggatggtttaaatgaacctcaggtgcaaaatgataatggtgactgcttcttgctaactgatgaatgcataggacttgttcagtctgctttccctgatgaaacagagcattttctacatgagaagaaactgagagagtcgaaaaagaagaatgtttctgaagaagaaacagcaacaccaagagcaacaacaatgggtgtacaaagaagcattaccgatttctaccgttcagcgaagaaagcagcagcaggtcaaagtatagagacaggcgggagttcaaaagcttctgcggaaaagaagagacaggcaacttctactagtagtagtaaccttacaaagtcggtcaggcgtcgtctcttgtttggatag

SEQ ID NO: 787 - protein, 570 aa, Arabidopsis thaliana
MGVGGNFWDLLRPYAQQQGFDFLRNKRVAVDLSFWIVQHETAVKGFVLKPHLRLTFFRTINLFSKFGAYPVFVVDGTPSPLKSQARISRFFRSSGIDTCNLPVIKDGVSVERNKLFSEWVRECVELLELLGIPVLKANGEAEALCAQLNSQGFVDACITPDSDAFLFGAMCVIKDIKPNSREPFECYHMSHIESGLGLKRKHLIAISLLVGNDYDSGGVLGIGVDKALRIVREFSEDQVLERLQDIGNGLQPAVPGGIKSGDDGEEFRSEMKKRSPHCSRCGHLGSKRTHFKSSCEHCGCDSGCIKKPLGFRCECSFCSKDRDLREQKKTNDWWIKVCDKIALAPEFPNRKIIELYLSDGLMTGDGSSMSWGTPDTGMLVDLMVFKLHWDPSYVRKMLLPMLSTIYLREKARNNTGYALLCDQYEFHSINEPEESIVVLEEEEESVDPLDGLNEPQVQNDNGDCFLLTDECIGLVQSAFPDETEHFLHEKKLRESKKKNVSEEETATPRATTMGVQRSITDFYRSAKKAAAGQSIETGGSSKASAEKKRQATSTSSSNLTKSVRRRLLFG

SEQ ID NO: 788 - DNA, 1890 bp, Oryza sativa
atgggggtggggggaagcttctgggacctgctcaagccgtacgcgcggcacgagggcgcggggtacctccgcggccgccgcgtcgccgtcgacctctccttctgggtcgtctcccacagcgccgccatccgggcgcgctcgccgcacgcgcgcctcccccatctccgcaccctcttcttccgcaccctctccctcttctccaagatgggtgcttttcctgtgttcgtggtggacggccagccgtcgccgctcaagtcgcaggtgagggccgcgcgattcttcagaggatctggaatggacctcgctgcgctgccgagcacggaggcggaggccagtgcggatgcgctggttcaaccgaggaatgccaagttcacgcgatacgtggaggattgcgtggaactgcttgaatatcttggaatgcctgtgctgcgggcaaaaggtgaaggtgaagctctttgtgctcagttgaataatcaaggccatgtagatgcttgcatcacttcagacagtgacgctttcctctttggggctaagactgtcataaaggttctccgatcgaattgtaaggaaccttttgagtgctacaacatggcagacattgagtctggtcttggactaaagaggaaacaaatggtagcaatggcacttcttgttggcagtgaccatgacttgcatggtgtgcctggttttggtcctgagactgcacttcggtttgtgcagttatttgatgaagataatgttctagctaaattatatgaaattggtaaaggggtctatccatttataggagttagtgcgcccaatattgatgatctcccatcaccctccacaaagagtctaccgcgtgcgcgatcaccgcactgctcacattgtggtcaccctggcaacaagaaaaatcatatcaaggatgggtgcaacttttgcttggttgattcattagagaattgtgtggagaagccagctggattcatatgtgaatgtcctagttgtgacaaggcacgtgatctgaaggtgcagagaagaaatgaaaactggcaaatcaaggtctgtaaaaggatagctgctgagactaactttccaaatgaggagatcattaacttgtacttgaatgatgacaatttggataatgaaaatggtgttccattgcttacatggaataaacctgatatggagattttggttgacttcttatctttcaagcagaactgggagccagcgtatattcgtcagcggatgcttcctatgctatcaaccatatatttacgcgaaatggcttcatctcaatctaaatcatttcttctttatgatcaatataaatttcattcaatccaacggattaagataagatatggtcacccatattacttggtcaagtggaagagagtcactcgtagtatgatatccaatgatccacctagcaagcagacagaattggaggggaagaatgataaggtggaggtattggatggagatgatgaggtagtagatgaagaggaggaggagcctacaatgatttccgaaactactgaactgctagatgagccagatgttccacaagtactggatgatgataaagattgctttttattaactgatgaagacattgagctagtgaatgctgcatttcctgatgaagcacaaagatttcaggaagaacagaggctgaaagaagcaaagtcaatagcacggaaatccaagctcaacgtggcaggtttcgaaacaccaaaaggtccaaggcctagtggagttcagcttagcatcaaggagttctaccgctccaagaaagggctgagtggcgactcagggaaggacggctcaagaaaatcctccgatgtggacctcagcaagaacttgcccaagtctgtccgacgacgcctcctcttcgactga

SEQ ID NO: 789 - protein, 629 aa, Oryza sativa
MGVGGSFWDLLKPYARHEGAGYLRGRRVAVDLSFWVVSHSAAIRARSPHARLPHLRTLFFRTLSLFSKMGAFPVFVVDGQPSPLKSQVRAARFFRGSGMDLAALPSTEAEASADALVQPRNAKFTRYVEDCVELLEYLGMPVLRAKGEGEALCAQLNNQGHVDACITSDSDAFLFGAKTVIKVLRSNCKEPFECYNMADIESGLGLKRKQMVAMALLVGSDHDLHGVPGFGPETALRFVQLFDEDNVLAKLYEIGKGVYPFIGVSAPNIDDLPSPSTKSLPRARSPHCSHCGHPGNKKNHIKDGCNFCLVDSLENCVEKPAGFICECPSCDKARDLKVQRRNENWQIKVCKRIAAETNFPNEEIINLYLNDDNLDNENGVPLLTWNKPDMEILVDFLSFKQNWEPAYIRQRMLPMLSTIYLREMASSQSKSFLLYDQYKFHSIQRIKIRYGHPYYLVKWKRVTRSMISNDPPSKQTELEGKNDKVEVLDGDDEVVDEEEEEPTMISETTELLDEPDVPQVLDDDKDCFLLTDEDIELVNAAFPDEAQRFQEEQRLKEAKSIARKSKLNVAGFETPKGPRPSGVQLSIKEFYRSKKGLSGDSGKDGSRKSSDVDLSKNLPKSVRRRLLFD

SEQ ID NO: 790 - DNA, 1875 bp, Populus trichocarpa
atgggtgtgggaggcaaattctgggatttactgaaaccctacgcgcgacatgaaggacccgatttcttgagagaaaagcgggtcgcagtggatctttcttattggattgtccaacatgaaacagctatcaaggcaacccatgttcggaaacctcatcttcgtctcactttcttccgtactatcaatctcttctccaagtttggagcgcttcccgtatttgttgttgatgggactccgtcgccattgaagtctaaagcaaggatagcgaggttttttcggttttcgggggttgatgtttcgggtttgccagtggctgaaggtgtttcggcggagaggaacaagacttttctcaaatgcgttcaagagtgtgtggaactgcttgaactgtttgggatgcctgttttaaaggccaatggtgaagctgaagcactgtgtgctcagttaaatgctgaaggccttgtggatgcgtgtattacagctgatagtgatgctttcctttttggggctaagtgtgtgataaaatgcgtcaagcctaataccaaagaaccatttgaatgctaccatatatcagatgttgaagctggtcttgggttgaagaggaaacacttgatagccatttccctcttggttggcaatgatcatgatcttaatggtgtgcaagggattgggcttgagaaggctcttcgttttgtccaaagtttcagtgaagatgagatattgaatcagttacatgaaatcagcaacgggaactctccttcacttcaaattgtttcaaaagttgtagatgaaataattctttgtccagatgaaagcccagcaaggtcgaaaacttctcattgctccttctgtgggcatccaggcagcaaaagagcacatttcaagtcatcttgtgaatattgtgggactagtaccagtcagggttgcataagaaaggcagagggttttaagtgtaattgctcctcctgtaataaggatcgaaaagaaaaggagcagcaaaagcatgaaaattggcacataaaagtttgcaacaagatatccacggagccaaactttccaaatgatgatattattcgaatgtatttgtgcaacaaacatggaaactttactggtattggcagcatgatgaggattgcatctggcgatggcttgtgtttatcatggagatgcccagacactgaaatactagttgatttcttggattttcatcagcattgggaaccatcttatgttcgacagagaatgcttcccatgttgtccaccatatatttgagagaaatggctgccaagcctgagaaaactatgttgtatgggcagtatgtatttgattctattcagcgtgtgaaaataagatatggacaccaatcttatgtgatcaggtggagaaaagtgacaagtacagctggcagtattgtccgtaccaactctgttgaagagtctgacaagcctcaagaagagatcgttgaaattgatgaattcattgatcatttggatgaggatactgccccccagattcatattgatgatgagtgttgcttcctgttgacagatgaaaatatggagcttattcgtgttgcttttccagaagaagttgaaagattttggcatgagaaggaactgaaagcatcgaaaagaagaaagggttcaggctttaaaaatgaagggtccagtgaaaagtcagaatcaccaaagtcaaaacgtgtccaacttagattaacagaattttaccgctctgctaaggtagcagcaattcacgcaaaacaaggagatctagccaataattctgaaaatcaagaggatgggccatcaaaagggaagaccaaggtttcaagttcaaaccttccaaagtctgtgagacgccgccttctgtttgagtag

SEQ ID NO: 791 - protein, 624 aa, Populus trichocarpa
MGVGGKFWDLLKPYARHEGPDFLREKRVAVDLSYWIVQHETAIKATHVRKPHLRLTFFRTINLFSKFGALPVFVVDGTPSPLKSKARIARFFRFSGVDVSGLPVAEGVSAERNKTFLKCVQECVELLELFGMPVLKANGEAEALCAQLNAEGLVDACITADSDAFLFGAKCVIKCVKPNTKEPFECYHISDVEAGLGLKRKHLIAISLLVGNDHDLNGVQGIGLEKALRFVQSFSEDEILNQLHEISNGNSPSLQIVSKVVDEIILCPDESPARSKTSHCSFCGHPGSKRAHFKSSCEYCGTSTSQGCIRKAEGFKCNCSSCNKDRKEKEQQKHENWHIKVCNKISTEPNFPNDDIIRMYLCNKHGNFTGIGSMMRIASGDGLCLSWRCPDTEILVDFLDFHQHWEPSYVRQRMLPMLSTIYLREMAAKPEKTMLYGQYVFDSIQRVKIRYGHQSYVIRWRKVTSTAGSIVRTNSVEESDKPQEEIVEIDEFIDHLDEDTAPQIHIDDECCFLLTDENMELIRVAFPEEVERFWHEKELKASKRRKGSGFKNEGSSEKSESPKSKRVQLRLTEFYRSAKVAAIHAKQGDLANNSENQEDGPSKGKTKVSSSNLPKSVRRRLLFE

SEQ ID NO: 792 - DNA, 1773 bp, Sorghum bicolor
atgggcgtggggggcagcttctgggacctgctcaagccctacgcgcggcacgagggcgcggggtacctgcgcggtcgccgagtcgccgtcgacctctccttctgggtcgtctcccacagcaccgccatccgggcgcgcttgccccgggcgcggagcccgcacctccggaccaccttcttccgcaccctctccctcttcgccaagatgggcgcgttccctgtgttcgtggtggacggcgagccgtcaccgctcaagtcgcaggcgagggctgcgcgcttcttccgaggctctgggatggacctggccgcgttgcctagcacagagacggagtccagtgcggccgcggcaccggtcaaaaggaggaatgctgcattcacgcgatgcgttgaggagtgcgtggaactgcttgaatatcttggaatgcctgtattgagggcaaaaggtgaagctgaagccctttgcgcacagctgaataatgaaggtcatgtagatgcttgcattactgcagacagtgatgctttcctctttggggctaagactgtcgtaaaggtcttcagatcgaattgcaaggaaccttttgagtgctaccacatagcagacattgagtctggtcttggattaaagaggaagcaaatggtggccatggcgctccttattggcagtgaccatgatttgcatggggtgcctggttttggcctggagactgcacttcgttttgtgcagttatttgatgaagatgaaattttagataagctacatgaaattggtagaggggtttatccattcctagaaggatttgacaatgcacatattgatgatctcccatcatcgtccacaaaaagcccagttgcaaaatcaccgcactgctcacattgtggtcacccgggcagcaagaaaaatcatagcaaggacgggtgcaattattgcttggtggattcattagagaattgtgtggaaaaaccagctggattcaaatgtgaatgtcctagctgtgacgaggcacgtgatctaaaggaacaaagacggcatgaaaattggcaaatcaaggtctgcaaaagaatagctgctgagacaaattttcctaatgaggagatcattaaattgtatctaagtgataataatctggttgaagaggtggcatcatctccatctacaccattgcttctttgtgatcaatatgaatttgattcaattcaacggattaaaataaggcatggtcacccttattacttggtgaaatggaagagagctacccgtggtatgaatactgatatgtccagcaagaagccagtaacggagggagagacaagtagcgatgtagcggtgttggatgaagatgacgatgaggatacagtggtttgcgagtcccctgagttactagatgaacctgatgttccacaagtgcttattgatgatggctgcacctttctattgacggatgaagacattcaacttgttggtgctgcttttcctaaggaaacagcaaggtttcaggaagaacagaggctgaaagaagcaagatcaagatcacgaaaatccaaatcaagcctagcagatactgcatgcgaaacacctaaaggtccgagacctagcggagtgcagcttagcatcacagagttctaccgctcgaagaaagggcagaacgcagagtctgggaagaaaccggctggagaagggcaagcctcgaaggaaggctcaagaaaatcctctgacagggacctcaacaaggacctgccaaagtctgttcgacgccgcctcctttttgatcattga

SEQ ID NO: 793 - protein, 590 aa, Sorghum bicolor
MGVGGSFWDLLKPYARHEGAGYLRGRRVAVDLSFWVVSHSTAIRARLPRARSPHLRTTFFRTLSLFAKMGAFPVFVVDGEPSPLKSQARAARFFRGSGMDLAALPSTETESSAAAAPVKRRNAAFTRCVEECVELLEYLGMPVLRAKGEAEALCAQLNNEGHVDACITADSDAFLFGAKTVVKVFRSNCKEPFECYHIADIESGLGLKRKQMVAMALLIGSDHDLHGVPGFGLETALRFVQLFDEDEILDKLHEIGRGVYPFLEGFDNAHIDDLPSSSTKSPVAKSPHCSHCGHPGSKKNHSKDGCNYCLVDSLENCVEKPAGFKCECPSCDEARDLKEQRRHENWQIKVCKRIAAETNFPNEEIIKLYLSDNNLVEEVASSPSTPLLLCDQYEFDSIQRIKIRHGHPYYLVKWKRATRGMNTDMSSKKPVTEGETSSDVAVLDEDDDEDTVVCESPELLDEPDVPQVLIDDGCTFLLTDEDIQLVGAAFPKETARFQEEQRLKEARSRSRKSKSSLADTACETPKGPRPSGVQLSITEFYRSKKGQNAESGKKPAGEGQASKEGSRKSSDRDLNKDLPKSVRRRLLFDH

SEQ ID NO: 794 - DNA, 1938 bp, Vitis vinifera
atgggggtgggagggagtttttgggaattactgaaaccctatgcccgacctgaaggcttcgattacatccgaaacaaacgggtggctgtggatctctctttctggatagtccaacaagaaaccgccactaaagccaatgttcggaaccctcacctcagactcactttcttccgtacgataaatctcttctccaagtttggcgcgtttccggtgtttgttgtggatggaactccgtcgcccttgaaatctcaggcaaggattgcacggttcttccgtggttctggaattgatttgtcgggtttgccggtggttgaggagggtgtttcggtggaaaggaatgccgaattctcaagacgcgttcaagagtgtgttgaactgcttgaacttcttggtattcctgtactgaaagcaagagaagaggctgaagctctttgtgcccagttaaatagtgaaggccatgtagatgcttgcatcacagctgacagtgatgcattcctctttggggctaaatgtgtgataaaatgcctccgacccaattgcaaggaacccttggaatgctaccacatgtcagatattgaatctggtcttggcctgaagaggaaacacttgatagccatctctcttttggttggcaatgactatgatttaaatggggtacaagggatcgggcttgacactgctgttcgttttgtccaaggctttagtgaagatgagattctgaataggttacaagaaaaaggcaatggggcaactgtgtttgatggggctgttaaatctatggatgattctattccctatgagaggtcaccaaggccaaaagttcctcattgttccatctgtgggcatccaggtcgcaagaaatctcatctcaagttttcttgtgatttttgtggcacctttcctaggaggggctgcttggaaaaaccagaggggtttgtatgtgattgctccacctgtgacatggatcgaaaagaaaaggcacagaagaagcaagaaaattggcagttaagggtttgcaaaaagattgccatggagcagaatttcccaaataatgagattattgaattgtatttgagcaataaccatgggcattttactgaaaaggatggacctcatatatcatgggaaagcccaaaaacagaggtgcttgttgatttcttagcttatcatcagcattgggagccgtcttatattcgtcaaaggatgcttcctatgttgtctaccatcttcttccgagaaaaggctttgaatccaacgaatacattgctatatgggcagtatgagtttgattctattcagcgtgtgaaggtaaggttcgggcatcaattttttgtggtcaaatggaagaaggctgtacatgcaatggctagtgttgcctatacaatccctggtgactctgatatagagcaagagaagctaacagaagttgatgaatccattgatctattggatgagtgcaatgttcctcagattcacgttgatgatgggtgctggtttttgttgactgatgaaaatatggacttagttcgggctgcttttccagaggaagttaacagatttctgctggaaaaggaactgaaagaatcaaaaagaagaaataagtctggtttaagatctgaaggggtggaagaaatgccagattcgccaaaatcaaaaggagtccagctaagtattactgaattttaccgttcagcaaaagtaatttttcatgaaaaaccagaagattcagctgggaattcagatgcccagggtagagagacctcaactgaaaagagaaaagcctcggattcaaagctttccaagtctgtaagacgacgccttttgtttggttagggtgtgatggtatttctactattgggaaatttgcttttgtttggttaacatgtaaatttgattcacttgtagccctcgaatcttgttcagctgtgcatagtctgg

SEQ ID NO: 795 - protein, 610 aa, Vitis vinifera
MGVGGSFWELLKPYARPEGFDYIRNKRVAVDLSFWIVQQETATKANVRNPHLRLTFFRTINLFSKFGAFPVFVVDGTPSPLKSQARIARFFRGSGIDLSGLPVVEEGVSVERNAEFSRRVQECVELLELLGIPVLKAREEAEALCAQLNSEGHVDACITADSDAFLFGAKCVIKCLRPNCKEPLECYHMSDIESGLGLKRKHLIAISLLVGNDYDLNGVQGIGLDTAVRFVQGFSEDEILNRLQEKGNGATVFDGAVKSMDDSIPYERSPRPKVPHCSICGHPGRKKSHLKFSCDFCGTFPRRGCLEKPEGFVCDCSTCDMDRKEKAQKKQENWQLRVCKKIAMEQNFPNNEIIELYLSNNHGHFTEKDGPHISWESPKTEVLVDFLAYHQHWEPSYIRQRMLPMLSTIFFREKALNPTNTLLYGQYEFDSIQRVKVRFGHQFFVVKWKKAVHAMASVAYTIPGDSDIEQEKLTEVDESIDLLDECNVPQIHVDDGCWFLLTDENMDLVRAAFPEEVNRFLLEKELKESKRRNKSGLRSEGVEEMPDSPKSKGVQLSITEFYRSAKVIFHEKPEDSAGNSDAQGRETSTEKRKASDSKLSKSVRRRLLFG

SEQ ID NO: 796 - DNA, 2181 bp, Drosophila melanogaster
atgggcgtcaaggaattatggggtgttttaacgccccattgtgaacgtaaacccattaatgaactgcggggaaagaaagtggccatcgacctggccggctgggtgtgcgaatctcttaatgttgtggactactttgtgcatccaaggcatcatttaaagaacctcttctttcgcacttgctacttgatttgggagcaagttactccggttttcgttttggagggagttgctccaaaactcaagagccaggtgatagccaaaaggaatgagctccagtttcggggagtgaagcccaagaattcgcctgagtgcacccaaagtcagccgtccaagggcgacaagggacgcagccggttcaaccatgttctcaagcagtgcgaaacgctgctgctctccatgggaatccagtgcgtccaaggtcccggcgaggcggaggcctactgtgcctttctcaacaagcatggcctagtggacggcgtcattagccaggactcggattgctttgcctatggagccgttcgtgtctatcgcaacttctccgtttccacccaaggagcccaggcagccgccggcggagctgtggacatctacgacatgcgggagatcacatcccgaatggactttggccaacagaagatcattgtgatggctttgctctgcggctgtgattattgtcctgatggcataggtggcattggcaaggatggcgtcctaaagctgttcaacaagtacaaggagactgagattttggatagaatgagaagctggcgtggtgaaaccgataaatacaatgccttggagatccgagtggacgacaaatccatctgcagcaattgtggccacattggcaagacccagagccacacaaaaagtggctgcagtgtgtgtcgcacacacaaaggctgcgatgagagtctctggaaagaacaacgactatccattaagtccgagttgactttgaggcggaaagccctattatctcctgactttcccaacgaagagatcattgccgagtttctcagcgaacccgacaccattcccaatctaaatctcaactggcggcaaccaaatcttgtcaaattcatcaaacaaatcggacatctcttgcagtggccagaaatatactgcttccaaaagttctttcccatactcacacgctggcaggtgcagcaatcgaagcaggagaagatacttatccagccacacgagattatcaaaaagcgaactgtgaagggtgtgcccagcttagaattgcgctggcacgatcccagtggcatcttcaagggtcttattccggacaagcagattgcggagtacgaagcggagcatcccaagggaatcgaggaactttactacaccattgagccattggacatgctggagacagcgtatcccgatttagtagcggcctttttgaagtcgaaggagaagcccgccaagaaaaccacgcgaaagaagaaaaccgcatctgaagaggagaataaggaaaacgagccgaattcgaaaccaaagcgagtggtcagaaagataaaggctcagcctgaagagaaccagccattactgcaccaattcctagggcgcaagaaggaaggtactccggtcaaggctcccgctccgcaacgtcagcaatgctccacccccatcaccaagttcctgccctccgatctggaaagcgattgcgatgccgaagagttcgatatgtcggacatagttaaaggcattatctcgaatccgaatgccaagccagcactgaccaaccacgatggtcaccagcttcattacgaacccatggcggaagatttgagcttacgtctggcgcagatgagtctaggaaatgtgaatgaatcgcccaaagtggaaacgaaaagagatctctctcaagtggatcaactaccgcagagtaagcgattctccttggaggacagttttgatctgctggtcaagggagatctgcagaagctggccaggacgccagtggagcgattcaagatgcagcatcgcatcagcgaaaagattccaacgccagtgaagcccttggataacataagttacttcttcaatcaaagttccgataatgcggatgtctttgaagagttgatgaactccagcttggtgccccaggatcaagaggataacgcagaagatgaggaggaggatgacctggtagtgattagtgattaa

SEQ ID NO: 797 - protein, 726 aa, Drosophila melanogaster
MGVKELWGVLTPHCERKPINELRGKKVAIDLAGWVCESLNVVDYFVHPRHHLKNLFFRTCYLIWEQVTPVFVLEGVAPKLKSQVIAKRNELQFRGVKPKNSPECTQSQPSKGDKGRSRFNHVLKQCETLLLSMGIQCVQGPGEAEAYCAFLNKHGLVDGVISQDSDCFAYGAVRVYRNFSVSTQGAQAAAGGAVDIYDMREITSRMDFGQQKIIVMALLCGCDYCPDGIGGIGKDGVLKLFNKYKETEILDRMRSWRGETDKYNALEIRVDDKSICSNCGHIGKTQSHTKSGCSVCRTHKGCDESLWKEQRLSIKSELTLRRKALLSPDFPNEEIIAEFLSEPDTIPNLNLNWRQPNLVKFIKQIGHLLQWPEIYCFQKFFPILTRWQVQQSKQEKILIQPHEIIKKRTVKGVPSLELRWHDPSGIFKGLIPDKQIAEYEAEHPKGIEELYYTIEPLDMLETAYPDLVAAFLKSKEKPAKKTTRKKKTASEEENKENEPNSKPKRVVRKIKAQPEENQPLLHQFLGRKKEGTPVKAPAPQRQQCSTPITKFLPSDLESDCDAEEFDMSDIVKGIISNPNAKPALTNHDGHQLHYEPMAEDLSLRLAQMSLGNVNESPKVETKRDLSQVDQLPQSKRFSLEDSFDLLVKGDLQKLARTPVERFKMQHRISEKIPTPVKPLDNISYFFNQSSDNADVFEELMNSSLVPQDQEDNAEDEEEDDLVVISD

SEQ ID NO: 798 - DNA, 2727 bp, Homo sapiens
atgggagtgaatgacttgtggcaaattttggagcctgttaagcaacacatccccttgcgtaatcttggtgggaaaaccattgcagttgatctgagtctctgggtgtgtgaggcacagacagtcaaaaaaatgatgggcagcgtcatgaagccccacctcaggaacttattttttcgtatctcatatttaacacaaatggatgtaaaactggtatttgttatggaaggggaaccaccaaagctgaaagctgatgtcataagcaagaggaatcagactcggtatgggtcttctggaaaatcgtggtctcagaaaacagggagatcacattttaaatcagtcttaagagagtgcctccatatgctcgaatgcttaggaatcccctgggttcaggctgctggggaagctgaagccatgtgtgcttatctcaatgctggtggtcatgtcgatggctgcctcaccaatgatggagatactttcctttatggggcccagactgtttacaggaatttcactatgaatacaaaggacccacatgttgactgttacacaatgtcatctatcaagagtaaactaggtttggatagagatgctctggttggattagcaatacttcttggctgtgattatctcccaaagggagtccctggagttggaaaagagcaagcattaaaacttatacagattttgaaagggcaaagtttacttcagaggtttaatcggtggaatgaaacatcttgtaactctagtccacaactgctagtcactaaaaaactggctcattgttccgtatgttcccatccaggttcacctaaggatcatgaacgtaatggatgcagattatgtaaaagtgataaatattgtgagccacatgactatgaatactgctgtccttgtgagtggcaccgtacagaacatgataggcaactcaatgaagtagagaacaatattaagaagaaagcttgctgttgtgagggattcccattccatgaggttattcaagaattccttttaaacaaggataaattggtgaaggttatcaggtaccaaagacctgatttgttattgtttcagagatttactcttgaaaaaatggagtggcccaatcactatgcatgtgagaaattgctggtacttttgacccattatgacatgatagaaagaaagcttggtagcagaaactctaatcaactacagccaattcgaattgttaagactcgaatcagaaatggagttcattgttttgaaatagaatgggaaaagcctgaacattatgctatggaagataaacaacatggagaatttgctttattaacaattgaggaagaatcattgtttgaagcagcatatcctgagatcgttgctgtttaccaaaaacaaaagttagaaattaaagggaagaaacaaaaacgtattaagcctaaagaaaacaatttgccagaaccagatgaagtaatgagctttcagtcacacatgactttaaaacccacatgtgaaatctttcataagcagaattccaagttaaattcggggatttcccctgatcctacattaccacaggaatctatttctgcctcattgaatagcttgcttttacctaaaaatactccatgtttgaatgcacaagaacagttcatgtcttctctaagacctttggctatacagcaaattaaagctgtcagtaagtctctaatttcagaatctagtcaacccaatacctcatctcataatatatccgtgattgctgatctacacttgagcactattgactgggaaggtacttcttttagtaattctccagctattcaaaggaatactttttctcatgatttaaaatcagaagttgaatcagagctatcagccatccctgatggctttgaaaatatcccagaacaactgtcctgtgaatcagaaaggtacactgcaaacataaagaaagtgttggatgaggattctgatgggattagtcctgaggagcatctactttctggcattactgatttatgtcttcaggatttgcctttaaaggaacgaatatttataaaattatcatatcctcaggataatctacaaccagatgtcaacctgaaaactttgtccatacttagtgtaaaagaatcttgtattgctaacagtggttctgattgtacatcacatctttcaaaggatcttccaggaattcccttgcaaaatgaatccagagactctaaaattctaaaaggagaccagctgcttcaagaagactataaagtcaatacttctgtcccttattctgtcagtaacacagtggtaaagacctgcaatgttagaccaccaaatactgctttagatcatagtagaaaagttgatatgcaaaccactcggaaaattttaatgaagaagagtgtttgccttgacagacattcctctgatgaacaaagtgccccagtgtttgggaaagctaagtacacaactcaaagaatgaagcacagttctcaaaagcataattcatcccatttcaaagaaagtggccataacaagttgagtagccctaagatacatattaaagaaactgaacagtgtgtcagatcttatgaaacagctgaaaatgaagaaagctgtttcccagattcaacaaaaagttctctgagttctctacaatgtcataagaaagaaaacaactctggtacttgtttggatagccctcttcctttatgccagagattaaaactaagattccaaagcacttga

SEQ ID NO: 799 - protein, 908 aa, Homo sapiens
MGVNDLWQILEPVKQHIPLRNLGGKTIAVDLSLWVCEAQTVKKMMGSVMKPHLRNLFFRISYLTQMDVKLVFVMEGEPPKLKADVISKRNQTRYGSSGKSWSQKTGRSHFKSVLRECLHMLECLGIPWVQAAGEAEAMCAYLNAGGHVDGCLTNDGDTFLYGAQTVYRNFTMNTKDPHVDCYTMSSIKSKLGLDRDALVGLAILLGCDYLPKGVPGVGKEQALKLIQILKGQSLLQRFNRWNETSCNSSPQLLVTKKLAHCSVCSHPGSPKDHERNGCRLCKSDKYCEPHDYEYCCPCEWHRTEHDRQLNEVENNIKKKACCCEGFPFHEVIQEFLLNKDKLVKVIRYQRPDLLLFQRFTLEKMEWPNHYACEKLLVLLTHYDMIERKLGSRNSNQLQPIRIVKTRIRNGVHCFEIEWEKPEHYAMEDKQHGEFALLTIEEESLFEAAYPEIVAVYQKQKLEIKGKKQKRIKPKENNLPEPDEVMSFQSHMTLKPTCEIFHKQNSKLNSGISPDPTLPQESISASLNSLLLPKNTPCLNAQEQFMSSLRPLAIQQIKAVSKSLISESSQPNTSSHNISVIADLHLSTIDWEGTSFSNSPAIQRNTFSHDLKSEVESELSAIPDGFENIPEQLSCESERYTANIKKVLDEDSDGISPEEHLLSGITDLCLQDLPLKERIFIKLSYPQDNLQPDVNLKTLSILSVKESCIANSGSDCTSHLSKDLPGIPLQNESRDSKILKGDQLLQEDYKVNTSVPYSVSNTVVKTCNVRPPNTALDHSRKVDMQTTRKILMKKSVCLDRHSSDEQSAPVFGKAKYTTQRMKHSSQKHNSSHFKESGHNKLSSPKIHIKETEQCVRSYETAENEESCFPDSTKSSLSSLQCHKKENNSGTCLDSPLPLCQRLKLRFQST

SEQ ID NO: 800 - DNA, 1521 bp, Arabidopsis thaliana
atggcttcgagtctgggcggcgatgagagaagcgagatagcgtttttcgaccttgagacggcggttccgaccaaatcaggggagcctttcgcgattttggagtttggggccatcttagtttgcccaaggaggctagaggagctctatagttactccactttggttcgacctactgatctttccttaatctctacgctcacaaagcgacgtagcggcattacgcgcgacggagttctctctgcacatacattctctgaaatcgccgataaggtctatgacattcttcacggacgaatttgggcgggacataacataattcgattcgattgtgtaagaataagagaagcatttgcagaaattggtctctctccgccagagccgaaagctacaattgattcgctttcattgttgtctcagaagtttgggaagagagctggtgacatgaagatggcatcacttgctacatacttcgggctaggagatcaagctcacaggagcttagatgatgtccggatgaatcttgaagttgtcaagtactgtgcaaccgtcttgtttctggagtccagtgttcctgacattcttacagacatgagctggttttccccacgaaaaagtcccagaacacgaagtaatgggaagttagtggctaatggagtcagagaaagctcgacttcttcctcctcgagtcctaaaactgatccgagttcctcttccgtggacgccacaatcgtcaaaaaccatcccatcgtttctcttcttacggaatgctcagaaagtgatgcatcaagttatgatatagaagatccaattgatataaccactttaataggtaaactacgtattggaactcttcagacggatgctgcagaagaagcgaaaactgtaagacagcaggatgaatcacctccatcacccgattccgatgccaaagatgaatcatttttgggtgttaatgaagtatctgtttctagcatcagggcaagtcttgtcccgttttatcgtgggagcttgagaatgaagctatttcacaacgacacccctctgcatctgtgttggcatagcttgaaagttcggttcggaataagccggaagtttgtggatcatgcaggtcgtccaaagttgaatattattgttgacgcccctcttgatctatgcaagatcttggacgcagttgatgctgctgcgcacaacttaccaactgactcaagcacaaactcagattggagacccactgttataaggaaagaaggctttgccaactatcccacagccagactgcatataagctcagaatccaacggagatgataccctgtgtggaacgcaggtatatcaaaaagaagaacctttgggaaccaatcaaaagctcgatgtcagtagcgataacttggaaaagcttgagtcagcattacttcccggtactctggttgatgcattcttctcactcgagccttacagttatcagcaaatggcagggatacgtctagcagtcaaaaagttggtgatcctcctgaaaaagtga

SEQ ID NO: 801 - protein, 506 aa, Arabidopsis thaliana
MASSLGGDERSEIAFFDLETAVPTKSGEPFAILEFGAILVCPRRLEELYSYSTLVRPTDLSLISTLTKRRSGITRDGVLSAHTFSEIADKVYDILHGRIWAGHNIIRFDCVRIREAFAEIGLSPPEPKATIDSLSLLSQKFGKRAGDMKMASLATYFGLGDQAHRSLDDVRMNLEVVKYCATVLFLESSVPDILTDMSWFSPRKSPRTRSNGKLVANGVRESSTSSSSSPKTDPSSSSVDATIVKNHPIVSLLTECSESDASSYDIEDPIDITTLIGKLRIGTLQTDAAEEAKTVRQQDESPPSPDSDAKDESFLGVNEVSVSSIRASLVPFYRGSLRMKLFHNDTPLHLCWHSLKVRFGISRKFVDHAGRPKLNIIVDAPLDLCKILDAVDAAAHNLPTDSSTNSDWRPTVIRKEGFANYPTARLHISSESNGDDTLCGTQVYQKEEPLGTNQKLDVSSDNLEKLESALLPGTLVDAFFSLEPYSYQQMAGIRLAVKKLVILLKK

SEQ ID NO: 802 - DNA, 711 bp, Arabidopsis thaliana
atggcggtccaaacatttcccaacgaaatcgtcttcttcgatctagaaacaaacgtaccaaacaaagcagggcaacattttcacatactagagtttggggcgatcatcgtatgtccaaaaaaactcgaggagctagagagcttcacaacgcttatacaacctaaagacttgtcggtggtctcaataaggtcgtctaggtcagatgggatcaccagggctaaggttacgaacgcaccaagttttgaagacgtggctgagaaaatccatggtttgttgaacggtaggatttgggcaggtcataacattagaagatttgattgcgttaggatcaaagaagctttcgctgagatcggtaaagctgcgcctgaaccctcagggatcattgattctttggggttattaagtgacaagtttggcaaaagagctggtaacatgaagatggcaagtttggctgcctattttggtcttggagttcaaaagcacaggagtctcgatgatgttcgaatgaatttagaggtcctcaagcattgtgcaacagtgcttttcttggaatctacacttcccaatcatttggaaggaaaatggcacacttcttctaagattatgacaagaagtcgaaggaattaccaaatagcccaaagggcaatgccttactcgaagggtagtctcgagaaggtaattgtgtttttttcccctctcttcaaatcataa

SEQ ID NO: 803 - protein, 236 aa, Arabidopsis thaliana
MAVQTFPNEIVFFDLETNVPNKAGQHFHILEFGAIIVCPKKLEELESFTTLIQPKDLSVVSIRSSRSDGITRAKVTNAPSFEDVAEKIHGLLNGRIWAGHNIRRFDCVRIKEAFAEIGKAAPEPSGIIDSLGLLSDKFGKRAGNMKMASLAAYFGLGVQKHRSLDDVRMNLEVLKHCATVLFLESTLPNHLEGKWHTSSKIMTRSRRNYQIAQRAMPYSKGSLEKVIVFFSPLFKS

SEQ ID NO: 804 - DNA, 1407 bp, Arabidopsis thaliana
atggatccagaggataggtccgagattgccttcttcgacgttgagacgactgtaccaaaacgaggtcaacgtttcgcgattctagaattcgggtcaatcctcgtttgcccgaagaagctaacggagctccgaagctacacgactctcgtccaacctgcagatttgagtctcatatcttccttgtccgtgaggtgcaatggtatcaaacgtgacgacgtcgttttggcacctctgtttgccgacatcgctgatactgtctacgacattctccatgggaggatttgggcaggtcataacatattgaggtttgattgtgcaaggatcagagaagcatttgcagagattggtcgtcaaccacccgagccaaaaggcgccattgattcattgggtttgctaactcagaagtttggtagaagagctggtgatatgaagatggcaactttggctagatatttcggactcgggaatcagacgcataggagcctggatgatgttcgaatgaatcttgaggttctcaaatattgtgctactgtcttgttcttggagtcgagtctcccatatgcacatgtagataattcggtatctcctgaaactattagttcaaggagacgtattgatgcatctcgcgagggtaatactgtaacgacctctgttaggctaccatccattagcgagaacagtgcagctcagccagatccgttcaacatgagcgtcttgaggaatgaaatggcttctgacaaccatattcaatcagacattctcatggaagaagaacaaattgaaccctctgatgttgtcgcctctgagaataccagtgaccatgagggtttcttgacgcctgacgcgatgtctctttcaaacatcaaagcgatgctcttcccgttttatcctggaagccaaatgatgaaactaaagctactccacggcgattcccctctgcagctctactgttcttatctgaaaatacggtttggagtcaatgggaagtttctggataacaccgggagacggaggttaaactttgttgttgatctgaatccaagcctttacagtatactcgaagcatgtgacagtaatgcgcagaaactatctgttgattcaggttccacttctgagtggaacccggtcgtgaatccaatgaagggatttgttaactaccctaacgcaaggatacatattgcgacagagataaatggagatgaagctcggtatgcaacagagatacaccaaagagagtcctctggagctactcagaaactaatcttcagcaacccgaacaatgaggagctcgaatcgttgctgaccacgggaagtgttgttgatgcattcttgtctcttgaaccgtatgattatcagcagaaagctggaatccgccttgttgccaaaaagctagtcattcagtcgtaa

SEQ ID NO: 805 - protein, 468 aa, Arabidopsis thaliana
MDPEDRSEIAFFDVETTVPKRGQRFAILEFGSILVCPKKLTELRSYTTLVQPADLSLISSLSVRCNGIKRDDVVLAPLFADIADTVYDILHGRIWAGHNILRFDCARIREAFAEIGRQPPEPKGAIDSLGLLTQKFGRRAGDMKMATLARYFGLGNQTHRSLDDVRMNLEVLKYCATVLFLESSLPYAHVDNSVSPETISSRRRIDASREGNTVTTSVRLPSISENSAAQPDPFNMSVLRNEMASDNHIQSDILMEEEQIEPSDVVASENTSDHEGFLTPDAMSLSNIKAMLFPFYPGSQMMKLKLLHGDSPLQLYCSYLKIRFGVNGKFLDNTGRRRLNFVVDLNPSLYSILEACDSNAQKLSVDSGSTSEWNPVVNPMKGFVNYPNARIHIATEINGDEARYATEIHQRESSGATQKLIFSNPNNEELESLLTTGSVVDAFLSLEPYDYQQKAGIRLVAKKLVIQS

SEQ ID NO: 806 - DNA, 1464 bp, Arabidopsis thaliana
atgttaacaatggttggtctaactccagctgaggatcgttcagagattgcctttttcgacgtcgagacgacaattccgttccgagttggtcaggggtacgcgattctggagtttggatcgattctggtttgccccaagaagcttgtggagctgaaaaactactctgttctggttcgtcctgctaatctcaacctcatcacgcctcggtccgtgaagtgcaacggcatcaaacgcgaagacgtcgaatcagctcttacctttgcagatatcgccgacaccgtctacgatattctccatggaaggatatgggcaggtcataacatattgaagttcgattgtccaaggataagagaagcatttgctgagattggacgagatccaccagagccaaagggcaccattgactccttggctttgcttactcaaaggtttgggagaagagctggtgatatgaagatggcgactttggctacatactttggacttggaaaccagacgcataggagtctggacgatgtaaggatgaacttcgaggttctcaagtattgtgccactgttttgttcttggagtcaagtcttccagatgaacttatagagaactcggttactactactactcctgaaactagttcaagaaggcgtaggactataaaaaaatctcctctgcaatctcccactgatcagcagacaggagagaacatgacaactatacctattttatcatttgtttcatccgcagaagctcaaacggatccatttgatatgagcactttgaggaacgaaatagcccctgaagttcttcaatcagatgttcccatggaagaagaacaaaatcagcagtctgagactgttgcctctgaaggtaccggtgaccaggaaggattcatggagctagataaaatatctgtttcaagtatcagagcaactcatgtcccgctatatgacgggagccaaacaatgaagctgcaactcttccttggggacagaccccttcagctccattgtcctcgtctgaaagtacggtttggaatcaatgggaaatttatggataaagctggaagacggaggttgaactttgtaattgatctgtatccaagtctctgcaacgtacttcaagaatgcgacagtgctgcacagacaatatctgttgattcaggcagtggttctgactggaaccctctagtcattccaatgaaaggatttctgaactgtcccactgcaaggatacatatacccacagagttaaatggagatatagatcggtacgcagctgagatacaccagaaagagttctctggagctactgctactcagaaactcatttctagcaaccccaaggctgaagagattgagtctttgttgaatccgagaactgttcttgacgctttcttgtctctggagccatatgattatcagcagagagccggaatccgtctagttgctagaaagcttgttatacattag

SEQ ID NO: 807 - protein, 487 aa, Arabidopsis thaliana
MLTMVGLTPAEDRSEIAFFDVETTIPFRVGQGYAILEFGSILVCPKKLVELKNYSVLVRPANLNLITPRSVKCNGIKREDVESALTFADIADTVYDILHGRIWAGHNILKFDCPRIREAFAEIGRDPPEPKGTIDSLALLTQRFGRRAGDMKMATLATYFGLGNQTHRSLDDVRMNFEVLKYCATVLFLESSLPDELIENSVTTTTPETSSRRRRTIKKSPLQSPTDQQTGENMTTIPILSFVSSAEAQTDPFDMSTLRNEIAPEVLQSDVPMEEEQNQQSETVASEGTGDQEGFMELDKISVSSIRATHVPLYDGSQTMKLQLFLGDRPLQLHCPRLKVRFGINGKFMDKAGRRRLNFVIDLYPSLCNVLQECDSAAQTISVDSGSGSDWNPLVIPMKGFLNCPTARIHIPTELNGDIDRYAAEIHQKEFSGATATQKLISSNPKAEEIESLLNPRTVLDAFLSLEPYDYQQRAGIRLVARKLVIH

SEQ ID NO: 808 - DNA, 1506 bp, Glycine max
atgggtgaagagcgatccgagatagtgttcttcgatgtggagaccagcgttccgacccgggcggggcagggttttgcgcttctggaattcggcgccattttggtttgccccaggacgctcacggagctccgcgattactccactctcgtccgcccagccaacctctccgtcatcacccccttgtccgagcgctgcaacggcatcaacgccgccgctgtctccgccgcccctaccttcgccgacattgctcacctcgtttacgacctcctccacgggaggatttgggcggggcataacatcataagattcgactgtgttcggattagagatgcgtttgctgagattaatcagccaccgcctgaacctaaggggaccattgactcgctggttttgttgactcaaaagtttggtagaagagctggtgacatgaagatggctactcttgctacttattttgggcttggacgccagacacataggagcttggatgatgttcggatgaatcttgaagtcctcaaatactgtgcaacagttctattcttggagtcaagtctcccagatatattcactgcaaatagttgggtttcaccaaatgctactacaagaagccgcagtaatgggaaatctccatcacagtggggcttattaaatattaataaagattctgtattatcatctcctgcaactgaatccaaagacaaaaatcgtccaataatttcttttgcattgagcagcccaaaagggaatgtctcgaatattgcagatcctaacatggatcaatcagatccttttaacttgagcactcttgaggctgaaataaaaagagaatccattaagtcagatgtcgccttggaggaaaaacccatgcaagagtcaactgatttggcttcctcatcttctgtatctcagccttgcagcagctctattgctgttttggaacctgatggaatatgtataccttctattgatgcatctcttgttccatcttttcgtggcagtcaaagaatagagttactgcatgaaggtttcctgtttcagcttcattgtactgatttgaaagtgcggtttggaataaactcaaagttttttgatagtgctggccggccacgattgagttttgtggttgatccatcaccaagtctatgtaatgttcttgatgcatgtgaccgtgtagcacagaagttaaccgtggattctggtagcagctctgattggaggcctgttgttattaggaaagaaggcttcttcaactatcctactgtcagattacacatacctactgcagtagtggcagacattgctatttatgccacggaaatatatcaaagagaatcatctggaacagtgcaaagacttctcttcagtaagtttgatgctgcagaacttggttccttgttcatgcctgggacatttgttgatgccgtcttctccttagatccgtatgattatcagcagaatgcagggattaaattagttgccaaaaaattgatcattcatagcaaatag

SEQ ID NO: 809 - protein, 501 aa, Glycine max
MGEERSEIVFFDVETSVPTRAGQGFALLEFGAILVCPRTLTELRDYSTLVRPANLSVITPLSERCNGINAAAVSAAPTFADIAHLVYDLLHGRIWAGHNIIRFDCVRIRDAFAEINQPPPEPKGTIDSLVLLTQKFGRRAGDMKMATLATYFGLGRQTHRSLDDVRMNLEVLKYCATVLFLESSLPDIFTANSWVSPNATTRSRSNGKSPSQWGLLNINKDSVLSSPATESKDKNRPIISFALSSPKGNVSNIADPNMDQSDPFNLSTLEAEIKRESIKSDVALEEKPMQESTDLASSSSVSQPCSSSIAVLEPDGICIPSIDASLVPSFRGSQRIELLHEGFLFQLHCTDLKVRFGINSKFFDSAGRPRLSFVVDPSPSLCNVLDACDRVAQKLTVDSGSSSDWRPVVIRKEGFFNYPTVRLHIPTAVVADIAIYATEIYQRESSGTVQRLLFSKFDAAELGSLFMPGTFVDAVFSLDPYDYQQNAGIKLVAKKLIIHSK

SEQ ID NO: 810 - DNA, 1506 bp, Glycine max
atgggtgaagaccgatccgaaatagtgttcttcgatgtggagaccagcgttcccacccgaacggggcagggttttgcgcttctggaattcggcgccattttggtttgccccaaaacgctcacggagcttcggaattactctactctcgttcgtcccgccaacctctccgtcatctcccccttgtcggagcgctgcaatggcatcaccgccgccgccgtctccgccgccccttccttcgccgacattgctcacctcgtttacgacctccttcacgggaggatttgggcggggcataatatcatacgattcgactgtgttcggattagagatgcctttgctgagattaatcagccgccgcctgaacctaagggaaccattgactcgctggttttgttgactcaaaagtttggaagaagagctggtgacatgaagatggctactcttgctacttattttgggcttggacgtcagacacataggagcttggatgatgttcggatgaatctggaagtcctcaaatactgtgcaacagttctattcttggagtcaagtctcccagatatattcactgcaaatagttgggtttcaccaaattctattacaagaagccgcagtaatgagaagtctctatcgcaggggggcttattaaatattaataaagattctgtattatcatctcctgcaaccgaatccaaggacaaaaatcatccaataatttcttttgcattgagcagcctaaaagggaatgtcccaaatattgcagatcctaatatagatcaatcggatccttttaacttgagcgctcttgaggctgaaataaaaagagaatccattaagtcagatgctgccatggaggaaaaaaccatgcaagagtcacctgatttggcttcctcatcttctgtatctcagccttgcagcagctctattgctgttttagaacctgatggaatatgtatcccttttattgatgcatctcttgttccatctttccttggcagtcaaaggatagaattactgcatgaaggtttcccgtttctgcttcattgtactgatttgaaagtgcggtttggaataaactcaaggttttttgatagggctggccggccacgattgagttttgtggttgatccatcaccaagtctatgtaatgttcttgatgcctgtgaccgtgtagcacagaagttaaacatggattctggtagcagctctgattggaggcctgttgttattaggaaagaaggcttcttcaactatcctactatcagattgcacatacctacagctgttgtggcagatgttgatatttatgctacggaaatataccaaagagaatcatctggaacagtgcaaagacttctcttcagcaagtttgatgctgcagaacttggttcgttgttcatgcctgggacatttgttgatgccttcttatccttagatccatatgattatcagcagaatgcagggattaaattagttagcaaaaaattgatcattcatggcaaatag

SEQ ID NO: 811 - protein, 501 aa, Glycine max
MGEDRSEIVFFDVETSVPTRTGQGFALLEFGAILVCPKTLTELRNYSTLVRPANLSVISPLSERCNGITAAAVSAAPSFADIAHLVYDLLHGRIWAGHNIIRFDCVRIRDAFAEINQPPPEPKGTIDSLVLLTQKFGRRAGDMKMATLATYFGLGRQTHRSLDDVRMNLEVLKYCATVLFLESSLPDIFTANSWVSPNSITRSRSNEKSLSQGGLLNINKDSVLSSPATESKDKNHPIISFALSSLKGNVPNIADPNIDQSDPFNLSALEAEIKRESIKSDAAMEEKTMQESPDLASSSSVSQPCSSSIAVLEPDGICIPFIDASLVPSFLGSQRIELLHEGFPFLLHCTDLKVRFGINSRFFDRAGRPRLSFVVDPSPSLCNVLDACDRVAQKLNMDSGSSSDWRPVVIRKEGFFNYPTIRLHIPTAVVADVDIYATEIYQRESSGTVQRLLFSKFDAAELGSLFMPGTFVDAFLSLDPYDYQQNAGIKLVSKKLIIHGK

SEQ ID NO: 812 - DNA, 780 bp, Oryza sativa
atgaataatatgaggacgacgatgcggcggccggagatggtgttcttcgacgtggagacgacggcggcgtcggcggatgaggggcagcgtagtgtgctggagttcggggccatcgtggtgtgcccccggaggctggtggaggtggacagctaccacacggtgatccggccgggcgacatgtcggcggtgtccaagaggttcgccgctatggtggatgtggacgtggcgtcggcgccgagcttcgatcaggtggcggagcgcatcttcggcgtgctggacgggcgggtgtgggcggggcacaacatccagcgcttcgactgccaccgcatccgcgaggcgttcgcggccatcgggcgggcagcgccggagcccgtggccatcgtcgactccctcaacgtgctggcccacgactttgggcgccgcgccggcgacctcaagatggccaccctcgcctcctacttcggcatcggcaagcagagccacaggagccttgacgacgcccgcatgaacctggaggtgctcaagcgctgcgccaccctcctgctgctcgagtccacccttcccccgggcatgctgcactcctccgccgccggatccatcaccaggaagaggagcaaccaccaagaggagccatcgtcgtcgtctcttgtcaatgtgacgcctagtaaaaggaagcagcggcagggcagcggcggcaaaatcaggcccaaggcagcaaccaccacgcccaagccatgcttccacatgatcctcaggcactccaggaccatcctcagatag

SEQ ID NO: 813 - protein, 259 aa, Oryza sativa
MNNMRTTMRRPEMVFFDVETTAASADEGQRSVLEFGAIVVCPRRLVEVDSYHTVIRPGDMSAVSKRFAAMVDVDVASAPSFDQVAERIFGVLDGRVWAGHNIQRFDCHRIREAFAAIGRAAPEPVAIVDSLNVLAHDFGRRAGDLKMATLASYFGIGKQSHRSLDDARMNLEVLKRCATLLLLESTLPPGMLHSSAAGSITRKRSNHQEEPSSSSLVNVTPSKRKQRQGSGGKIRPKAATTTPKPCFHMILRHSRTILR

SEQ ID NO: 814 - DNA, 1284 bp, Oryza sativa
atgttggcgaagacgatggcatatatgtccatggaggagggtgaggggagtagtagggcgatggtcgaggaggagccagagatcgccttctttgacgtggagacctccatgccatggggtcctagggagaggcgcacgctactcgagttcgggtccatcttcctctgcccgcggctggttgaggtcgcggagcccttcgtcacgctcgtgcgcccctccgaccttggggtggtcacggaggcgctcgaacgtaagggcatcacgcgtggcgccctcgaagacgccccgcccttctgtgacgtcgctgataacatccacaacgtcctgcacgggcgaatctgggctggtcacaacatcatttcgtttgactcagagataataagggaagcattcgctgaaattggacggtcgcctccggaaccaaaggggatgatcgacaccttacctctgcttacccagacgtttgggaggagagcagggaacatgaagatggcaaatttggcagattactttaatctagggccgcaaattcacaggagtctgtatgatgtcaggatgaatcttgatgttctcaagtgttgttctacagtgctgttcctggaggataattttccaaaactgctaagcggtgggttgaggcattttccagaactgctaagcggcggtttcctcaacccaaatgatatttcacttgagttcatccaagtttctatttctttttcctcttgtttgggcaaaagaagtctaaattccggcctccgcaccaatcctcttccatacgaatttgaacggagcttatgtatcaagcacaacgatgatccgctacaacttcattgcataggtttgagggtccattatgaagtttctctgaatcaaaacagtgaaggtcgaccaaagttgagcatagtggttgacatccctgagaatctcagacaagttctagaattttgtgatgaaatagctaagacaacattccgggagtttgggagcacttctgaatggcggcaagtgattaaggaatacgggaatcgtccttgtgtacgcctaaacatccccattataggcagcggcgacgatgcgacctatgcgatagagatatacctgaaagaggctagcggcaacatccggaagaaagatttcagcaaggcagatgtcgcagagctggaatttatgttttttcgaggggacatggtcgacgcgttcttctctgtggaactgtacaactacaaaaataatgctggtattcggctggtcgccaagaagctggttgtacactgcaggtag

SEQ ID NO: 815 - protein, 427 aa, Oryza sativa
MLAKTMAYMSMEEGEGSSRAMVEEEPEIAFFDVETSMPWGPRERRTLLEFGSIFLCPRLVEVAEPFVTLVRPSDLGVVTEALERKGITRGALEDAPPFCDVADNIHNVLHGRIWAGHNIISFDSEIIREAFAEIGRSPPEPKGMIDTLPLLTQTFGRRAGNMKMANLADYFNLGPQIHRSLYDVRMNLDVLKCCSTVLFLEDNFPKLLSGGLRHFPELLSGGFLNPNDISLEFIQVSISFSSCLGKRSLNSGLRTNPLPYEFERSLCIKHNDDPLQLHCIGLRVHYEVSLNQNSEGRPKLSIVVDIPENLRQVLEFCDEIAKTTFREFGSTSEWRQVIKEYGNRPCVRLNIPIIGSGDDATYAIEIYLKEASGNIRKKDFSKADVAELEFMFFRGDMVDAFFSVELYNYKNNAGIRLVAKKLVVHCR

SEQ ID NO: 816 - DNA, 1482 bp, Oryza sativa
atggagatggcgacgagcgcgggggaggggacgagcggtggtggtggaggaggaggaggagctgtgccggaggcggggggccccgagatcgcgttcttcgacgtggagacctccgtgccgcagcgggcggggcaggggtacgcgctgctggagttcggggccatcctcgtgtgcccgcggcggctcgtcgtggtggggtcctacgccacgctcgtccgccccggcgacctcggggtcgtctccgcggcgtccgtgcgctgcaacggcatcacccgcgacgccgtcgccgccgccccggccttccgcgacgtcgccgacgccgtctacagcgtccttcacgggcgtgtctgggctggtcacaacatcgtaaggtttgacttggccagaataagggaagcattcgctgaaattggacggccacctccggaaccaaaggggatgatcgacaccttgcctctgcttacccagaaatttgggaggagagcaggggacatgaagatggcaagcttggcaaattactttggtctggggcgacaaagtcacaggagccttgatgatgttaggatgaatcttgaagttctcaagtattgtgctacagttctcttcttggaggcaagtcttccaggagtgctgactgttgagaacctggtggagcgtgcaattacaaggagccaagctaatggagctgcttctcctgaggtgccaaaacctgtagcacggtcttcacctgattcctcaaaacggcaacgaacaatttctcgagttgacaatgcaatccaagctggaggtaaccaacaatcaatcgatcctgcaacaaacaaggaacccattgagttgatatccaatatcgaggaaatgacattaggttctggcatacagatcgatgcaagttctagtgggttttctgggttcctcgagccagatgacgtttcaactgagtccatccaaatttctgttccttcttcctaccgattaactcgaaaaacatctatcaagcacaaaggtagcccgatccaactttgttgtgctggtctgcggatccagtttggagtcagcacaaagttcctagacagcgcaggtcgcccaaagttgaacatactggttgacatccctgagaatctcagtaaaattctagaattctgtgatggtatcgctcagaaatcatctcaggattctgggagcacttctgaatggagaccattgattaaaaaatatggttatgtgaattgtcctactgtccgcctacacatccccactattgtcagcggtgaagctgcgacctatgggaccgaaatataccagaaagaggctagcggcaacattcagaagctagttttcagcaaggtagatgtcgcggagctggactcttggtttgttcgagggaacatggtggacgcattcttctctctggaactatatgactacgaagaaaatgctggtatccggctggttgctaagaagctggttgtacaatccaaatag

SEQ ID NO: 817 - protein, 493 aa, Oryza sativa
MEMATSAGEGTSGGGGGGGGAVPEAGGPEIAFFDVETSVPQRAGQGYALLEFGAILVCPRRLVVVGSYATLVRPGDLGVVSAASVRCNGITRDAVAAAPAFRDVADAVYSVLHGRVWAGHNIVRFDLARIREAFAEIGRPPPEPKGMIDTLPLLTQKFGRRAGDMKMASLANYFGLGRQSHRSLDDVRMNLEVLKYCATVLFLEASLPGVLTVENLVERAITRSQANGAASPEVPKPVARSSPDSSKRQRTISRVDNAIQAGGNQQSIDPATNKEPIELISNIEEMTLGSGIQIDASSSGFSGFLEPDDVSTESIQISVPSSYRLTRKTSIKHKGSPIQLCCAGLRIQFGVSTKFLDSAGRPKLNILVDIPENLSKILEFCDGIAQKSSQDSGSTSEWRPLIKKYGYVNCPTVRLHIPTIVSGEAATYGTEIYQKEASGNIQKLVFSKVDVAELDSWFVRGNMVDAFFSLELYDYEENAGIRLVAKKLVVQSK

SEQ ID NO: 818 - DNA, 1545 bp, Oryza sativa
atggacggcggacggcggccaagttcaccggagctcgtcgtgacgattcgagagagagggagtacaccggaacgatgggacggacaagaggaagtgagccaccgggtcggattcgccggagggaggccagcgacgacgaatcgtggcggcgcacgccggcggcgcgaaaaggggggaaacttcaccggagcaacgggggttcgattcaaaaggatgggagcatctccggggttcaaggagttcatttccggcgttggatggggtagagcgacgccgtggaggtccggcgacgagaggcggcctccgggagcgggcgccgacggcggcaaggccatggcgagcggcagcggggcttggggcggcgcctacgaaccacgcgagttaaaggaggaggagggcgagcgaggaagaggaacggagggctaccgcgtcgggacagggcaccgtgacgagcggcggcggcgcgggaggcaagctctccagcctcgggccggggaaggggaaggagaagagtggccggagtccgcgtcagctcctcgtgcgcacgccggcttcaccagcacgcgcgacggcggagggaggcgaggacggcggcagcatggtggggatggtggtccggcggcaatggcgctgtgggaggaaacgagaggaaacgagtgggaggtcgagacgctgagggggggggctcggattcgatctcgggggtttagggaggaatcaagggagactcaaggaaaggattcgagatgggaatttgatatttttcggaaatggggacagatggcaaatttggcagattactttaatctagggccgcaaattcacaggagtctgtatgatgtcaggatgaatcttgatgttctcaagtgttgttctacagtgctgttcctggaggataattttccagaactgctaagcggcggtttcctcaacccaaatgatatttcactcgagttcatccaagtttctatttctttttcctcttgtttgggcaaaagaagtctaacttccggccttcgcaccaattctcttccataccaatttgaatggagcttatgtatcgagcacaacgataatccgctacaacttcgttgcataggtttgagggtccgttatgaagtttatctgtatcaagacagtgaaggtcgaccaaataagttgagcatagtggttgacatccctgagaatctcagacaagttctagaattttgtgatgaaatagctgagataacattccggaagtttgggagcaattctgaatggcggcaagtgattaaggaatacgggaatcgtcctagtgtacgcctaaacatccccatcgtaggcagcggcgacgatgcgacctatgcgacagagatatacctgaaagaggctagcggcaacatccggaagaaggatttcagcaaggcagatgtcgcagagctggaatttatgttttttcgaggggacatggtcgacgcgttcttctctgtggaactatacgactacaaaaataatgctggtattcggctggtcgccaagaagttggttgtacactgcaggtag

SEQ ID NO: 819 - protein, 514 aa, Oryza sativa
MDGGRRPSSPELVVTIRERGSTPERWDGQEEVSHRVGFAGGRPATTNRGGARRRREKGGNFTGATGVRFKRMGASPGFKEFISGVGWGRATPWRSGDERRPPGAGADGGKAMASGSGAWGGAYEPRELKEEEGERGRGTEGYRVGTGHRDERRRRGRQALQPRAGEGEGEEWPESASAPRAHAGFTSTRDGGGRRGRRQHGGDGGPAAMALWEETRGNEWEVETLRGGARIRSRGFREESRETQGKDSRWEFDIFRKWGQMANLADYFNLGPQIHRSLYDVRMNLDVLKCCSTVLFLEDNFPELLSGGFLNPNDISLEFIQVSISFSSCLGKRSLTSGLRTNSLPYQFEWSLCIEHNDNPLQLRCIGLRVRYEVYLYQDSEGRPNKLSIVVDIPENLRQVLEFCDEIAEITFRKFGSNSEWRQVIKEYGNRPSVRLNIPIVGSGDDATYATEIYLKEASGNIRKKDFSKADVAELEFMFFRGDMVDAFFSVELYDYKNNAGIRLVAKKLVVHCR

SEQ ID NO: 820 - DNA, 1509 bp, Populus trichocarpa
atggaaaacaaaacagagatagctttcttcgatgttgaaaccacggtcccgacccgacccggccaggggtatgctatacttgaattcggggccatccttgtctgcccccagaagctagaagagatcaggagctactcgaccttggtccgaccctccaacccgaagctcatatcttccttgtccgtacggtgtaacggcatcataccagaagctgtggtttcagcaccgtccttcgctgacattgctgacacggtctacgacatcctccatgggaggatatgggcgggccataatatagtcagatttgattgtgtgcgaataagagaggcgtttgcggagattggaagggcagcaccagagccaaaggggactattgactcgttagcattattgactcagaagtttggaaggagagctggcaacatgaagatggcaagccttgcaacttattttgggcttggaaaccaaacacataggagtttagatgatgtaagaatgaatgttgaggttcttaagcattgtgctactgtcctattcctgcctcaatcaacagacgcatttccagaaaaccattgggtttcccctaatgctatcacaagaagtcgtagaaatggaaaatccccagtcctaaacaagaattccccgtcttcgagttcacacgttaaaagcacccctgccctgtctcctgaaaatgatagaactgaggaaaagcgtccagtcttttctcttctcacaagcaatactgctgaggcccaatattctgttgcatctaatacagctcatcctgatacatttgacatggtcgcacttggcaatgaaatgaatgctgcctcctttcaaccagatgtcgccatggaggaaaacccaatactacagcctcctgagatgccttctacagtgactgtccctgaaagttgcagtgacgttttgggtttcttagagcttgatgaagtttctctttcttctattagagcatttcatgtcccgttctttcgagggagtcatagaatcaaattattttacgagggggccattttgcagcttcgctgtcctcggttgaggatacggtttggactaagtacgaagttttctgatcatgcaggccggccacggttgagttttgtggttgatgcatctccaagtctatgtgatgttcttgatacatgtgagagcattgtgcggaaagtttgtgcagattcggattgtagttctgattggaggagtgttgttaccagaaaacagggctttgtcaacaaccctaccgtgagattgaacatacctactgcagtaaatggggatgttgctcaatatgcaacggatatgtatctgaaagaaccatctggaaccacacaaaagctcatattcagtaagtttgatgctgccgagctggatacctggttcagaccagggacctttgtcgatgcatacttgtccttggatccatacgactatcagcagacttctggcatccgattagtggcaaataaattaatcatccataatgagtga

SEQ ID NO: 821 - protein, 502 aa, Populus trichocarpa
MENKTEIAFFDVETTVPTRPGQGYAILEFGAILVCPQKLEEIRSYSTLVRPSNPKLISSLSVRCNGIIPEAVVSAPSFADIADTVYDILHGRIWAGHNIVRFDCVRIREAFAEIGRAAPEPKGTIDSLALLTQKFGRRAGNMKMASLATYFGLGNQTHRSLDDVRMNVEVLKHCATVLFLPQSTDAFPENHWVSPNAITRSRRNGKSPVLNKNSPSSSSHVKSTPALSPENDRTEEKRPVFSLLTSNTAEAQYSVASNTAHPDTFDMVALGNEMNAASFQPDVAMEENPILQPPEMPSTVTVPESCSDVLGFLELDEVSLSSIRAFHVPFFRGSHRIKLFYEGAILQLRCPRLRIRFGLSTKFSDHAGRPRLSFVVDASPSLCDVLDTCESIVRKVCADSDCSSDWRSVVTRKQGFVNNPTVRLNIPTAVNGDVAQYATDMYLKEPSGTTQKLIFSKFDAAELDTWFRPGTFVDAYLSLDPYDYQQTSGIRLVANKLIIHNE

SEQ ID NO: 822 - DNA, 618 bp, Populus trichocarpa
atggaggcctccagtcctgtaagcacaccagagattgtgttcttcgacttagaaacaacggtgcccaataaagctggacaacggttctgggtactggagtttggtgcaataatagtttgtccacggaaacttgttgagctagatagttatagcacactcataagacctgaggacttgtctgctgttgcattgaagtctggtcgatgtgatgggataactcgtgaagctgttgcaaatgcacctgcattcgaggaagttgctgacaaaatatttaccattttgaacggtagaatatgggctggacataacatccaaagatttgactgtgtccgaattaaggaggcatttgcagagattggtcggcctgcaccaatgcctgttggaatgtttgattctttaggagttctgacggaaaaatttggcagaagagctggtaacatgaagatggcaactttggctacttattttgggctcggccagcaaaaacacagatgtgcgtatgaacctggaggtcttgaagcattgcgcagcagttttattcgtggaatcaagccttccaagtgtaatgaatggcaaatggcacaacccttcgacaatggtaactcgaagcagaagtaa

SEQ ID NO: 823 - protein, 205 aa, Populus trichocarpa
MEASSPVSTPEIVFFDLETTVPNKAGQRFWVLEFGAIIVCPRKLVELDSYSTLIRPEDLSAVALKSGRCDGITREAVANAPAFEEVADKIFTILNGRIWAGHNIQRFDCVRIKEAFAEIGRPAPMPVGMFDSLGVLTEKFGRRAGNMKMATLATYFGLGQQKHRCAYEPGGLEALRSSFIRGIKPSKCNEWQMAQPFDNGNSKQK

SEQ ID NO: 824 - DNA, 679 bp, Populus trichocarpa
atggagtcgtctagtccttatcccgtaggctcaccagagattgtggtcttcgacttggaaacaacggtgcccaatagagccggacaacggttccgggtactggagtttggtgcaataacagtttgtccacggaaacttgttgagctagatagctatagtaccctcataagacctaaggacttgtctgctgttgcattgaagtctggtcgatgtgatggaataactcgtggagctgtttcaaatgcacctgcattcgaggaagttgctgataaaatttttagtattttgaatggtagaatttgggcaggacataacatccaaagatttgactgtgtccggattaaggaggcatttgcagagattggtaagccggcgccagttcctgctggaatgattgattctttaggagtcctgactgaaagattcggcagaagagccggtaacatgaagatggcaactttagctgcttattttgggctcggcaagcaaaaacacaggagtctcgatgacgttcgtatgaacttagaggtcttgaagcattgcgctacggttttattcctggaatcatgccttccaagcgtttcgaatgccaaatggtgcaacccttcaacaatagtaactcgaagcagaagtaatggaaaactgccgtgtagggaagaaaatagccgaaaatcacctc

SEQ ID NO: 825 - protein, 231 aa, Populus trichocarpa
MESSSPYPVGSPEIVVFDLETTVPNRAGQRFRVLEFGAITVCPRKLVELDSYSTLIRPKDLSAVALKSGRCDGITRGAVSNAPAFEEVADKIFSILNGRIWAGHNIQRFDCVRIKEAFAEIGKPAPVPAGMIDSLGVLTERFGRRAGNMKMATLAAYFGLGKQKHRSLDDVRMNLEVLKHCATVLFLESCLPSVSNAKWCNPSTIVTRSRSNGKLPCREENSRKSPPTTLG

SEQ ID NO: 826 - DNA, 2280 bp, Saccharomyces cerevisiae
atgggtgtctcacaaatatgggaatttttgaagccatatctgcaagattccagaattccgttgagaaagtttgtcatagactttaataaatcgcaaaaaagagctccaagaatcgcgattgacgcatatggatggctatttgagtgtggatttatccaaaatatagatataagccccagatctagatcaagatcaaggagtcctacccgttctccgcgtgatagtgatatcgacagtagtcaagaatattatggtagcagaagttatacaactacaggaaaagctgtgataaacttcatatctcgattaaaagaactactgagtttaaacgtcgaattcttgcttgtatttgacggagttatgaaaccctctttcaaaaggaaatttaaccacgaacagaacgctactacttgtgatgatgagaaagagtactattcaagctgggaacagcatgttaagaatcatgaagtttatggcaattgtaaaggattgctagcgccatctgaccctgagttcatcagtcttgtacggaaattattagacttgatgaacatttcatatgtaatcgcatgtggggagggagaagcccagtgtgtttggctgcaagtttctggggctgtagatttcattttaagtaacgattcagatactctcgtatttgggggagaaaaaatcctgaaaaattactcgaaattctacgatgattttggcccaagttcaataacttcccacagtcccagtagacatcatgatagtaaagaatcttttgttactgttatagatctacccaaaattaataaagtagcagggaagaagtttgatcgcctgtctctcttatttttcagcgtgctattaggtgccgattacaatcgtggagtcaagggtttgggtaaaaacaaatctttgcagttggctcaatgcgaagatcctaacttttccatggaattttatgacattttcaaagatttcaatttagaagatttgacatcagaaagtctgaggaagtctcggtatagattgtttcaaaaaagattatatttatactgcaaggatcattctgtcgagctatttggaagaaattatcctgttttattgaatcaaggttcatttgaaggctggccatcaactgtcgcaatcatgcactattttcaccccattgtccaaccatattttgatgaagaagttctcagtgataaatacataaatatggctggaaacggacactacagaaacttaaatttcaatgaactgaaatattttttacaaagtttgaatttgcctcaaatttctagcttcgacaagtggtttcatgattctatgcacgagatgtttctattaagagaatttttatcaattgatgagtccgataatataggtaaaggtaatatgaggattaccgaagaaaaaattatgaacatagatggtggaaagttccaaataccatgttttaaaatacggtatacaacattcttgcctaatatacccatttcttctcaatctcctttgaagcgcagtaattctcccagtagaagcaagagtcccacacgacgtcagatggatataatggaacacccaaatagtctttggttacccaaatacttgatacctcaatcgcatccattagtaattcaatattatgagacacagcaacttatacagaaagaaaaagagaagaaaggtaaaaaatcgaataagtctcggctaccacagaagaataacttggatgagtttttaagaaagcatacttcgccgattaaaagtatcggaaaggtaggcgagtcgagaaaggaaatcctggaacctgtgagaaaaaggctttttgtagatacagacgaagatactagtctggaagaaataccggctcccacaagactgaccaccgtcgatgaacacagcgataatgacgatgattcgttgatttttgtagatgagattacaaacagccaaagcgttttagatagttcacccggtaaaagaattcgggatcttacacaggacgaacaggttgacgtttggaaggacgtaatagaaatatcaccaataaaaaagtcaagaactactaatgctgagaaaaatccgcctgagtctggtttaaaatcacgctcaagcatcacaatcaatgctcgccttcaaggtactaagatgttgcctccaaacttgactgctccaaggttagaaagagaacactcctctgtccttgaccaacttgtcacagacgcacaagatacagtcgaccggtttgtagcctgtgacagtgatagcagtagcactattgaatga

SEQ ID NO: 827 - protein, 759 aa, Saccharomyces cerevisiae
MGVSQIWEFLKPYLQDSRIPLRKFVIDFNKSQKRAPRIAIDAYGWLFECGFIQNIDISPRSRSRSRSPTRSPRDSDIDSSQEYYGSRSYTTTGKAVINFISRLKELLSLNVEFLLVFDGVMKPSFKRKFNHEQNATTCDDEKEYYSSWEQHVKNHEVYGNCKGLLAPSDPEFISLVRKLLDLMNISYVIACGEGEAQCVWLQVSGAVDFILSNDSDTLVFGGEKILKNYSKFYDDFGPSSITSHSPSRHHDSKESFVTVIDLPKINKVAGKKFDRLSLLFFSVLLGADYNRGVKGLGKNKSLQLAQCEDPNFSMEFYDIFKDFNLEDLTSESLRKSRYRLFQKRLYLYCKDHSVELFGRNYPVLLNQGSFEGWPSTVAIMHYFHPIVQPYFDEEVLSDKYINMAGNGHYRNLNFNELKYFLQSLNLPQISSFDKWFHDSMHEMFLLREFLSIDESDNIGKGNMRITEEKIMNIDGGKFQIPCFKIRYTTFLPNIPISSQSPLKRSNSPSRSKSPTRRQMDIMEHPNSLWLPKYLIPQSHPLVIQYYETQQLIQKEKEKKGKKSNKSRLPQKNNLDEFLRKHTSPIKSIGKVGESRKEILEPVRKRLFVDTDEDTSLEEIPAPTRLTTVDEHSDNDDDSLIFVDEITNSQSVLDSSPGKRIRDLTQDEQVDVWKDVIEISPIKKSRTTNAEKNPPESGLKSRSSITINARLQGTKMLPPNLTAPRLEREHSSVLDQLVTDAQDTVDRFVACDSDSSSTIE

SEQ ID NO: 828 - protein, 29 aa, Artificial sequence
  motif 40
  VARIANT (2)..(2): / replace = "Lys" / replace = "Cys"
  VARIANT (3)..(3): / replace = "Thr"
  VARIANT (6)..(6): / replace = "Ile"
  VARIANT (8)..(8): / replace = "Ala"
  VARIANT (14)..(14): / replace = "Arg"
  VARIANT (15)..(15): / replace = "Ala"
  VARIANT (17)..(17): / replace = "Leu"
  VARIANT (20)..(20): / replace = "Ala"
  VARIANT (25)..(25): / replace = "Glu" / replace = "Leu"
GQRVAVDTYSWLHKGAYSCSRELCKGLPT

SEQ ID NO: 829 - protein, 50 aa, Artificial sequence
  motif 41
  VARIANT (2)..(2): / replace = "Phe"
  VARIANT (4)..(4): / replace = "Lys"
  VARIANT (8)..(8): / replace = "Met"
  VARIANT (10)..(10): / replace = "Leu"
  VARIANT (12)..(12): / replace = "His"
  VARIANT (13)..(13): / replace = "Lys"
  VARIANT (14)..(14): / replace = "Ile"
  VARIANT (17)..(17): / replace = "Val"
  VARIANT (18)..(18): / replace = "Val"
  VARIANT (29)..(29): / replace = "Ser"
  VARIANT (30)..(30): / replace = "Glu"
  VARIANT (31)..(31): / replace = "Thr" / replace = "Glu"
  VARIANT (36)..(36): / replace = "Arg"
  VARIANT (38)..(38): / replace = "Lys"
  VARIANT (44)..(44): / replace = "Ala"
  VARIANT (47)..(47): / replace = "Arg"
  VARIANT (49)..(49): / replace = "Leu"
  VARIANT (50)..(50): / replace = "Leu" / replace = "Trp"
YCMHRVNLLRHYGVKPILVFDGGRLPMKADQENKRARSRKENLERAKEHE

SEQ ID NO: 830 - protein, 29 aa, Artificial sequence
  motif 42
  VARIANT (2)..(2): / replace = "Gln" / replace = "Ala"
  VARIANT (4)..(4): / replace = "Ile"
  VARIANT (12)..(12): / replace = "Leu"
  VARIANT (13)..(13): / replace = "Pro"
  VARIANT (14)..(14): / replace = "Tyr"
  VARIANT (17)..(17): / replace = "Lys"
  VARIANT (19)..(19): / replace = "Val"
  VARIANT (20)..(20): / replace = "Phe"
  VARIANT (23)..(23): / replace = "Leu"
  VARIANT (25)..(25): / replace = "Arg"
  VARIANT (26)..(26): / replace = "Tyr" / replace = "Asn"
VDAVITEDSDLIAFGCPRIIFKMDKFGQG

SEQ ID NO: 831 - DNA, 2194 bp, Oryza sativa; identical to SEQ ID NO: 289

SEQ ID NO: 832 - DNA, 1244 bp, Oryza sativa
aaaaccaccgagggacctgatctgcaccggttttgatagttgagggacccgttgtgtctggttttccgatcgagggacgaaaatcggattcggtgtaaagttaagggacctcagatgaacttattccggagcatgattgggaagggaggacataaggcccatgtcgcatgtgtttggacggtccagatctccagatcactcagcaggatcggccgcgttcgcgtagcacccgcggtttgattcggcttcccgcaaggcggcggccggtggccgtgccgccgtagcttccgccggaagcgagcacgccgccgccgccgacccggctctgcgtttgcaccgccttgcacgcgatacatcgggatagatagctactactctctccgtttcacaatgtaaatcattctactattttccacattcatattgatgttaatgaatatagacatatatatctatttagattcattaacatcaatatgaatgtaggaaatgctagaatgacttacattgtgaattgtgaaatggacgaagtacctacgatggatggatgcaggatcatgaaagaattaatgcaagatcgtatctgccgcatgcaaaatcttactaattgcgctgcatatatgcatgacagcctgcatgcgggcgtgtaagcgtgttcatccattaggaagtaaccttgtcattacttataccagtactacatactatatagtattgatttcatgagcaaatctacaaaactggaaagcaataagaaatacgggactggaaaagactcaacattaatcaccaaatatttcgccttctccagcagaatatatatctctccatcttgatcactgtacacactgacagtgtacgcataaacgcagcagccagcttaactgtcgtctcaccgtcgcacactggccttccatctcaggctagctttctcagccacccatcgtacatgtcaactcggcgcgcgcacaggcacaaattacgtacaaaacgcatgaccaaatcaaaaccaccggagaagaatcgctcccgcgcgcggcggcgacgcgcacgtacgaacgcacgcacgcacgcccaaccccacgacacgatcgcgcgcgacgccggcgacaccggccgtccacccgcgccctcacctcgccgactataaatacgtaggcatctgcttgatcttgtcatccatctcaccaccaaaaaaaaaaggaaaaaaaaacaaaacacaccaagccaaataaaagcgacaa

SEQ ID NO: 833 - DNA, 56 bp, Artificial sequence
  prm12748
ggggacaagtttgtacaaaaaagcaggcttaaacaatgggaatacaagggctttta

SEQ ID NO: 834 - DNA, 50 bp, Artificial sequence
  prm12749
ggggaccactttgtacaagaaagctgggtgttttccaaaagtcagcgtct

SEQ ID NO: 835 - DNA, 1071 bp, Medicago truncatula
atggcgaaaaaatcgcagaagcaaatagagaaagacgacaatgcaagcaatgataatgataatctgaatccaagtaacactgtcaccaccaaagcaaaacggacgaggaaaagtgtccctagaacttctccacctcaacgcagctcaatatacagaggagtcactaggcaccgttggacaggccgatatgaagctcatttgtgggacaagaattgttggaatgagtctcagaacaagaaagggagacaaggtgcttatgataatgaggagacggcagcacatgcttatgatctagcagcattgaaatattggggtcaagataccattattaattttccgctatcaaactatcagaaagaactaattgaaatggagagtcaatcaagggaggagtatattggatccttaagaaggaaaagcagtggtttttcacggggtgtatctaaatacagaggtgtagcaagacatcatcatgacggaaggtgggaggcacggattggcaaagtttttggcaataagtatctttatctcggaacatatgctacccaagaagaagcagctacagcttatgacatggcagctattgaataccgtggacttaatgctgttaccaatttcgacctaagccgttatattaagtggcttaagcccaacaataacaacaatgacgacaataacaagtctaatattaatctttgtgacattaactctaacagtagtgccaacgactcaaactctaatgaagaattggaatttagcctcgtggacaatgaaatatcactcaataattctattgacgaagccacattggttcaacctcgaccaactagtgccacgtcagccctagagcttttgcttcaatcatctaagtttaaggaaatggtggaaatggcatcaatgacttccaatgtgtcaacgacgttggagtctgatcaattgtcacaatgtgcatttcctgatgacattcaaacgtactttgaatatgaaaatttcaatgatacaatgttggaagacctcaactccattatgcctacgtttcattatgactttgagggtgctgaggttttatag

SEQ ID NO: 836 - protein, 356 aa, Medicago truncatula
MAKKSQKQIEKDDNASNDNDNLNPSNTVTTKAKRTRKSVPRTSPPQRSSIYRGVTRHRWTGRYEAHLWDKNCWNESQNKKGRQGAYDNEETAAHAYDLAALKYWGQDTIINFPLSNYQKELIEMESQSREEYIGSLRRKSSGFSRGVSKYRGVARHHHDGRWEARIGKVFGNKYLYLGTYATQEEAATAYDMAAIEYRGLNAVTNFDLSRYIKWLKPNNNNNDDNNKSNINLCDINSNSSANDSNSNEELEFSLVDNEISLNNSIDEATLVQPRPTSATSALELLLQSSKFKEMVEMASMTSNVSTTLESDQLSQCAFPDDIQTYFEYENFNDTMLEDLNSIMPTFHYDFEGAEVL

SEQ ID NO: 837 - DNA, 1038 bp, Arabidopsis thaliana
atgttcatcgccgtcgaagtttctccggtaatggaagacatcacacggcagagcaaaaaaacttcggttgagaatgaaaccggcgatgatcagtcagcaacatcagtagtccttaaagctaaacgcaaacgccgatcgcaaccacgagacgctccaccccaacgtagctccgtccatagaggcgtcacaaggcatcgatggactggaaggtacgaagcacatttgtgggataagaatagttggaacgaaactcagaccaagaaaggaagacaagtatatttaggggcatatgacgaggaagatgcagcagcacgtgcctacgacttagcagcattgaaatattggggacgagacaccatcttgaacttccctttgtgtaattatgaagaagacatcaaagaaatggaaagccagtcaaaggaagagtatattggatctttgagaagaaaaagtagtgggttttcacgaggtgtatcaaaatacagaggcgttgcaaagcatcaccacaatgggagatgggaagctcgaatcggaagagtgtttggcaataaatatttataccttggaacttacgcgacgcaagaagaagcagctatagcgtacgatatcgcagctatcgagtaccgtggactcaacgccgttactaacttcgacatcagccgttatctgaaactcccggtgccggagaaccctatcgataccgcgaataatctcctcgagagtccgcattctgatcttagcccatttataaaacctaaccacgagtctgacttatcacagagtcaatcttcgtcagaggacaacgatgatcggaaaacaaagctcttgaagtcgtcacctttagtggcagaggaggtaatcggaccatcgacgccacctgagattgctccgcctcgtcggagcttcccggaagatatccagacgtatttcgggtgtcaaaactccggcaagttaacggcggaggaagatgatgttatcttcggtgatttagattctttccttacgcctgatttctacagcgagttaaatgattgctaa

SEQ ID NO: 838 - protein, 345 aa, Arabidopsis thaliana
MFIAVEVSPVMEDITRQSKKTSVENETGDDQSATSVVLKAKRKRRSQPRDAPPQRSSVHRGVTRHRWTGRYEAHLWDKNSWNETQTKKGRQVYLGAYDEEDAAARAYDLAALKYWGRDTILNFPLCNYEEDIKEMESQSKEEYIGSLRRKSSGFSRGVSKYRGVAKHHHNGRWEARIGRVFGNKYLYLGTYATQEEAAIAYDIAAIEYRGLNAVTNFDISRYLKLPVPENPIDTANNLLESPHSDLSPFIKPNHESDLSQSQSSSEDNDDRKTKLLKSSPLVAEEVIGPSTPPEIAPPRRSFPEDIQTYFGCQNSGKLTAEEDDVIFGDLDSFLTPDFYSELNDC

SEQ ID NO: 839 - DNA, 1047 bp, Aquilegia sp.
atggcgaagatatcacagcagaatcagaagatcactgtaaataacattaaaactaatgatgagactataaccaaagtgaagagaaagcgaaagagcgttccaagagactctcctcctcaacgcagctcaatatttcgaggagtcacaaggcatcgatggacaggtcgatatgaagctcatctctgggataagagttgttggaatgagtcgcagaagaagaaaggaagacaagtctatcttggtgcttataacgacgaagaggctgcagcacatacatatgatttggcagcactaaagtattggggacctgaaaccatccttaacttcccggtatcaacttaccaaggggagctagaggaaatggagagtcagtcaagagaagaatatattggatcattgagaaggaagagtagtggattttctcgtggagtttcgaaatacagaggtgttgcaagacatcatcacaatggaagatgggaagctcgaattggcagagtatttggcaacaaatatctctatcttggaacttatgcaactcaagaagaagctgcaacagcatatgacatggcagcaattgagtaccgtggactcaatgcagttaccaactttgacctcagccgttacatcaaatggcttcgacccaaccctacggactctaaaactaataattctagccctgactcccaccttgctgcaaccccaactgaagatattggaattggcatcctcaaccatcagacctctatcacaagcaaaatggttgtagggcagccacgaccaacaggtggctccagtgcttcatcggctctaggacttctgtttcagtcatcaaagttcaaggaaatgcttgagagaacatcatcagtggattacccttacccatcaacaccaccggaatctgacccaccaaggtgtagttttccagaagaaatacaaacctacttcgagtgtcaggattctgagagctatgtggaaggaaatgacattattttctgcgatctaaacactttttcatccccgatgtttcagcatgagttggagacatga

SEQ ID NO: 840 - protein, 348 aa, Aquilegia sp.
MAKISQQNQKITVNNIKTNDETITKVKRKRKSVPRDSPPQRSSIFRGVTRHRWTGRYEAHLWDKSCWNESQKKKGRQVYLGAYNDEEAAAHTYDLAALKYWGPETILNFPVSTYQGELEEMESQSREEYIGSLRRKSSGFSRGVSKYRGVARHHHNGRWEARIGRVFGNKYLYLGTYATQEEAATAYDMAAIEYRGLNAVTNFDLSRYIKWLRPNPTDSKTNNSSPDSHLAATPTEDIGIGILNHQTSITSKMVVGQPRPTGGSSASSALGLLFQSSKFKEMLERTSSVDYPYPSTPPESDPPRCSFPEEIQTYFECQDSESYVEGNDIIFCDLNTFSSPMFQHELET

SEQ ID NO: 841 - DNA, 693 bp, Citrus clementina
atggcgaaaacctcaaggcaaagccaaaagaacactactacaaaccctaataacaataatacagtcacgaccaagactaagagaacaagaaaaagcgtgccccgtgactcgccgccgcaacgtagctcgatctaccgaggcgttaccaggcatcgatggacgggacgatatgaagctcatttgtgggataaaaattgctggaatgagtctcaaaacaagaaagggagacaagtatatttaggtgcttatgataatgaagaagctgcagcacgtgcctatgatttggcagcattgaaatattggggacatgatactattcttaatttcccactttcgaattatgaagaagagctcgtagaaatggagggtcagtcaaaagaggaatatattggttctttaaggagaaaaagtagtggattttctcgaggggtctccaaatatagaggcgtagcaagacaccatcacaatggcagatgggaagctcgaattggcagagtttttggcaacaaatatctctatcttggaacttatgctactcaagaagaagcagctcaagcctatgacagggcagcaatagagtatcgtgaacttaatgctgtcaccaactttgatcttagcaaatacattaagtggttacgcccaaataataatcaaaataaccctaaaactagcaaccctcaaacaaaaccctaa

SEQ ID NO: 842 - protein, 230 aa, Citrus clementina
MAKTSRQSQKNTTTNPNNNNTVTTKTKRTRKSVPRDSPPQRSSIYRGVTRHRWTGRYEAHLWDKNCWNESQNKKGRQVYLGAYDNEEAAARAYDLAALKYWGHDTILNFPLSNYEEELVEMEGQSKEEYIGSLRRKSSGFSRGVSKYRGVARHHHNGRWEARIGRVFGNKYLYLGTYATQEEAAQAYDRAAIEYRELNAVTNFDLSKYIKWLRPNNNQNNPKTSNPQTKP

SEQ ID NO: 843 - DNA, 690 bp, Citrus clementina
atggcgaaaacctcaaggcaaagccaaaagaacactactacaaaccctaataacaataatacagtcacgaccaagactaagagaacaagaaaaagcgtgccccgtgactcgccgccgcaacgtagctcgatctaccgaggcgttaccaggcatcgatggacgggacgatatgaagctcatttgtgggataaaaattgctggaatgagtctcaaaacaagaaagggagacaagtatatttaggtgcttatgataatgaagaagctgcagcacgtgcctatgatttggcagcattgaaatattggggacatgatactattcttaatttcccactttcgaattatgaagaagagctcgtagaaatggagggtcagtcaaaagaggaatatattggttctttaaggagaaaaagtagtggattttctcgaggggtctccaaatatagaggcgtagcaagacaccatcacaatggcagatgggaagctcgaattggcagagtttttggcaacaaatatctctatcttggaacttatgctactcaagaagaagcagctcaagcctatgacagggcagcaatagagtatcgtggacttaatgctgtcaccaactttgatcttagcaatacattaagtggttacgcccaaataataatcaaaataaccctaaacctagcaacctcaacaaacccctaa

SEQ ID NO: 844 - protein, 229 aa, Citrus clementina
MAKTSRQSQKNTTTNPNNNNTVTTKTKRTRKSVPRDSPPQRSSIYRGVTRHRWTGRYEAHLWDKNCWNESQNKKGRQVYLGAYDNEEAAARAYDLAALKYWGHDTILNFPLSNYEEELVEMEGQSKEEYIGSLRRKSSGFSRGVSKYRGVARHHHNGRWEARIGRVFGNKYLYLGTYATQEEAAQAYDRAAIEYRGLNAVTNFDLSNTLSGYAQIIIKITLNLATSTNP

SEQ ID NO: 845 - DNA, 1116 bp, Citrus clementina
atggcgaaaacctcaaggcaaagccaaaagaacactactacaaaccctaataacaataatacagtcacgaccaagactaagagaacaagaaaaagcgtgccccgtgactcgccgccgcaacgtagctcgatctaccgaggcgttaccaggcatcgatggacgggacgatatgaagctcatttgtgggataaaaattgctggaatgagtctcaaaacaagaaagggagacaagtatatttaggtgcttatgataatgaagaagctgcagcacgtgcctatgatttggcagcattgaaatattggggacatgatactattcttaatttcccactttcgaattatgaagaagagctcgtagaaatggagggtcagtcaaaagaggaatatattggttctttaaggagaaaaagtagtggattttctcgaggggtctccaaatatagaggcgtagcaagacaccatcacaatggcagatgggaagctcgaattggcagagtttttggcaacaaatatctctatcttggaacttatgctactcaagaagaagcagctcaagcctatgacagggcagcaatagagtatcgtggacttaatgctgtcaccaactttgatcttagcaaatacattaagtggttacgcccaaataataatcaaaataaccctaaacctagcaaccctcaacaaaaccctaatagtgatgacacaagtccaattccaaaactaaatcaggaaacctcaagcggtagtgacacgtcagcacctccaccacggtctggtgctaccgcaggaggtagcggctcggcgtcatcggcattagggcttttgctacaatcgtcaaaatataaggaaagggtggagaaaactttcaccagattgtttatctacgtcatcagaacctgggtcttcccaaccggaatttttctgaagatattccgacgagggtttttccaattgttcgggactctagcagccttacccggaagggtggaggacgttttcattggggtggacccaaaatcccattatatttttccccaactttttttaaggtggaaacttggaataaatttaaaaaaacaaaaaccctgggaacccccccacgggaaggaaaaataa

SEQ ID NO: 846 - protein, 371 aa, Citrus clementina
MAKTSRQSQKNTTTNPNNNNTVTTKTKRTRKSVPRDSPPQRSSIYRGVTRHRWTGRYEAHLWDKNCWNESQNKKGRQVYLGAYDNEEAAARAYDLAALKYWGHDTILNFPLSNYEEELVEMEGQSKEEYIGSLRRKSSGFSRGVSKYRGVARHHHNGRWEARIGRVFGNKYLYLGTYATQEEAAQAYDRAAIEYRGLNAVTNFDLSKYIKWLRPNNNQNNPKPSNPQQNPNSDDTSPIPKLNQETSSGSDTSAPPPRSGATAGGSGSASSALGLLLQSSKYKERVEKTFTRLFIYVIRTWVFPTGIFLKIFRRGFFQLFGTLAALPGRVEDVFIGVDPKSHYIFPQLFLRWKLGINLKKQKPWEPPHGKEK

SEQ ID NO: 847 - DNA, 747 bp, Citrus clementina
atggcgaaaacctcaaggcaaagccaaaagaacactactacaaaccctaataacaataatacagtcacgaccaagactaagagaacaagaaaaagcgtgccccgtgactcgccgccgcaacgtagctcgatctaccgaggcgttaccaggcatcgatggacgggacgatatgaagctcatttgtgggataaaaattgctggaatgagtctcaaaacaagaaagggagacaagtatatttaggtgcttatgataatgaagaagctgcagcacgtgcctatgatttggcagcattgaaatattggggacatgatactattcttaatttcccactttcgaattatgaagaagagctcgtagaaatggagggtcagtcaaaagaggaatatattggttctttaaggagaaaaagtagtggattttctcgaggggtctccaaatatagaggcgtagcaagacaccatcacaatggcagatgggaagctcgaattggcagagtttttggcaacaaatatctctatcttggaacttatgctactcaagaagaagcagctcaagcctatgacagggcagcaatagagtatcgtggacttaatgctgtcaccaactttgatcttagcaaatacattaagtggttacgcccaaataataatcaaaataaccctaaacctagcaaccctcaacaaaaccctaatagtgatgacacaagtccaattccaaaaactaaatcaagaaacctcaagcggtag

SEQ ID NO: 848 - protein, 248 aa, Citrus clementina
MAKTSRQSQKNTTTNPNNNNTVTTKTKRTRKSVPRDSPPQRSSIYRGVTRHRWTGRYEAHLWDKNCWNESQNKKGRQVYLGAYDNEEAAARAYDLAALKYWGHDTILNFPLSNYEEELVEMEGQSKEEYIGSLRRKSSGFSRGVSKYRGVARHHHNGRWEARIGRVFGNKYLYLGTYATQEEAAQAYDRAAIEYRGLNAVTNFDLSKYIKWLRPNNNQNNPKPSNPQQNPNSDDTSPIPKTKSRNLKR

SEQ ID NO: 849 - DNA, 981 bp, Citrus clementina
atggcgaaaacctcaaggcaaagccaaaagaacactactacaaaccctaataacaataatacagtcacgaccaagactaagagaacaagaaaaagcgtgccccgtgactcgccgccgcaacgtagctcgatctaccgaggcgttaccaggcatcgatggacgggacgatatgaagctcatttgtgggataaaaattgctggaatgagtctcaaaacaagaaagggagacaagtatatttaggtgcttatgataatgaagaagctgcagcacgtgcctatgatttggcagcattgaaatattggggacatgatactattcttaatttcccactttcgaattatgaagaagagctcgtagaaatggagggtcagtcaaaagaggaatatattggttctttaaggagaaaaagtagtggattttctcgaggggtctccaaatatagaggcgtagcaagacaccatcacaatggcagatgggaagctcgaattggcagagtttttggcaacaaatatctctatcttggaacttatgctactcaagaagaagcagctcaagcctatgacagggcagcaatagagtatcgtggacttaatgctgtcaccaactttgatcttagcaaatacattaagtggttacgcccaaataataatcaaaataaccctaaacctagcaaccctcaacaaaaccctaatagtgatgacacaagtccaattccaaaactaaatcaggaaacctcaagcggtagtgacacgtcagcacctccaccacggtctggtgctaccgcaggaggtagcggctcggcgtcatcggcattagggcttttgctacaatcgtcaaaatataaggaaatggtggagaaaacttcaacagattgtttatctacgtcatcagaacctggttcttcacaccggatttttcctgatgatattcagacgatgtttttcgattgtcaggactctagcagctacacggaggggtga

SEQ ID NO: 850 - protein, 326 aa, Citrus clementina
MAKTSRQSQKNTTTNPNNNNTVTTKTKRTRKSVPRDSPPQRSSIYRGVTRHRWTGRYEAHLWDKNCWNESQNKKGRQVYLGAYDNEEAAARAYDLAALKYWGHDTILNFPLSNYEEELVEMEGQSKEEYIGSLRRKSSGFSRGVSKYRGVARHHHNGRWEARIGRVFGNKYLYLGTYATQEEAAQAYDRAAIEYRGLNAVTNFDLSKYIKWLRPNNNQNNPKPSNPQQNPNSDDTSPIPKLNQETSSGSDTSAPPPRSGATAGGSGSASSALGLLLQSSKYKEMVEKTSTDCLSTSSEPGSSHRIFPDDIQTMFFDCQDSSSYTEG

SEQ ID NO: 851 - DNA, 795 bp, Citrus sinensis
atggcgaaaacctcaaggcaaagccaaaagaacactactacaaaccctaataacaataatacagtcacgaccaagactaagagaacaagaaaaagcgtgccccgtgactcgccgccgcaacgtagctcgatctaccgaggcgttaccaggcatcgatggacgggacgatatgaagctcatttgtgggataaaaattgctggaatgagtctcaaaacaagaaagggagacaagtatatttaggtgcttatgataatgaagaagctgcagcacgtgcctatgatttggcagcattgaaatattggggacatgatactattcttaatttcccactttcgaattatgaagaagagctcgtagaaatggagggtcagtcaaaagaggaatatattggttctttaaggagaaaaagtagtggattttctcgaggggtctccaaatatagaggcgtagcaagacaccatcacaatggcagatgggaagctcgaattggcagagtttttggcaacaaatatctctatcatggaacttatgctactcaagaagaagcagtctcagcctatgacagggcaaacatagagtatcgtggacttaatgctggccccactttgatcttatcaaatacatacagtggttacgccccattaataattaaaataacccctaacctagctaccctcaacaaaaacctaatagtgatggacacagtccaaatcctaaacctaaatcagggaacctccagcggaagtgaccctacacgacctcacacctcgtgttggggctaccgcaggaggtaa

SEQ ID NO: 852 - protein, 264 aa, Citrus sinensis
MAKTSRQSQKNTTTNPNNNNTVTTKTKRTRKSVPRDSPPQRSSIYRGVTRHRWTGRYEAHLWDKNCWNESQNKKGRQVYLGAYDNEEAAARAYDLAALKYWGHDTILNFPLSNYEEELVEMEGQSKEEYIGSLRRKSSGFSRGVSKYRGVARHHHNGRWEARIGRVFGNKYLYHGTYATQEEAVSAYDRANIEYRGLNAGPTLILSNTYSGYAPLIIKITPNLATLNKNLIVMDTVQILNLNQGTSSGSDPTRPHTSCWGYRRR

SEQ ID NO: 853 - DNA, 693 bp, Citrus sinensis
atggcgaaaacctcaaggcaaagccaaaagaacactactacaaaccctaataacaataatacagtcacgaccaagactaagagaacaagaaaaagcgtgccccgtgactcgccgccgcaacgtagctcgatctaccgaggcgttaccaggcatcgatggacgggacgatatgaagctcatttgtgggataaaaattgctggaatgagtctcaaaacaagaaagggagacaagtatatttaggtgcttatgataatgaagaagctgcagcacgtgcctatgatttggcagcattgaaatattggggacatgatactattcttaatttcccactttcgaattatgaagaagagctcgtagaaatggagggtcagtcaaaagaggaatatattggttctttaaggagaaaaagtagtggattttctcgaggggtctccaaatatagaggcgtagcaagacaccatcacaatggcagatgggaagctcgaattggcagagttttttggcacaaatatctttatcttggaacttatgctactcaagaagaagcagctccagcctatgacagggcagcaatagagtatcggggacttaatggggtcaccaccttggatcttaacaaatacattaaggggttacgccccaataaaaatcaaaataaccccaaaccctaccaaccctcaacaaaaccctaa

SEQ ID NO: 854 - protein, 230 aa, Citrus sinensis
MAKTSRQSQKNTTTNPNNNNTVTTKTKRTRKSVPRDSPPQRSSIYRGVTRHRWTGRYEAHLWDKNCWNESQNKKGRQVYLGAYDNEEAAARAYDLAALKYWGHDTILNFPLSNYEEELVEMEGQSKEEYIGSLRRKSSGFSRGVSKYRGVARHHHNGRWEARIGRVFWHKYLYLGTYATQEEAAPAYDRAAIEYRGLNGVTTLDLNKYIKGLRPNKNQNNPKPYQPSTKP

SEQ ID NO: 855 - DNA, 666 bp, Citrus sinensis
atggcgaaaacctcaaggcaaagccaaaagaacactactacaaaccctaataacaataatacagtcacgaccaagactaagagaacaagaaaaagcgtgccccgtgactcgccgccgcaacgtagctcgatctaccgaggcgttaccaggcatcgatggacgggacgatatgaagctcatttgtgggataaaaattgctggaatgagtctcaaaacaagaaagggagacaagtatatttaggtgcttatgataatgaagaagctgcagcacgtgcctatgatttggcagcattgaaatattggggacatgatactattcttaatttcccactttcgaattatgaagaagagctcgtagaaatggagggtcagtcaaaagaggaatatattggttctttaaggagaaaaagtagtggattttctcgaggggtctccaaatatagaggcgtagcaagacaccatcacaatggcagatgggaagctcgaattggcagagtttttggcaacaaatatctctatcttggaacttatgctactcaagaagaagcagctcaagcctatgacagggcagcaatagagtatcgtggacttaatgctgtcaccaactttgatcttagcaaatacattaagtggttacgcccaaataataatcaaaataacccctaa

SEQ ID NO: 856 - protein, 221 aa, Citrus sinensis
MAKTSRQSQKNTTTNPNNNNTVTTKTKRTRKSVPRDSPPQRSSIYRGVTRHRWTGRYEAHLWDKNCWNESQNKKGRQVYLGAYDNEEAAARAYDLAALKYWGHDTILNFPLSNYEEELVEMEGQSKEEYIGSLRRKSSGFSRGVSKYRGVARHHHNGRWEARIGRVFGNKYLYLGTYATQEEAAQAYDRAAIEYRGLNAVTNFDLSKYIKWLRPNNNQNNP

SEQ ID NO: 857 - DNA, 699 bp, Gossypium hirsutum
atgacgaaactatcacaggtgaaccacaaaaacagtgcacaaagtggtagtgttaataacaatatttctacaagtaatgatgttactaaggtgaagaagagaactaggagaagttttccaagagattcaccaccacaacgtagctctatttatcgaggggtcactaggcataggtggacaggtcgatatgaagctcacctgtgggacaagaattgctggaatgaatcacaaaacaagaaaggacgccaagtctatcttggtgcttatgatgatgaagaatctgcagcacatgcttatgatttagcagcactcaaatactggggtcaagataccattcttaactttccggtatcaacataccagaaggaattaaaagaaatggagaatcaatctagagaagagtatattggatcattgagaaggaaatctagtggcttctctcgcggagtttctaaatatagaggtgttgctagacatcaccataatggaagatgggaagctcgcattggcagagttttcggcaacaaatacctctatcttgggacatacgctacacaagaagaagctgccacagcatatgatatggctgctatagagtatcgaggattaaacgctgtgaccaacttcgatttaagtcgttatatcaaatggctaaagccaaacccaaacccaaccctaccacccctaactctaatatag

SEQ ID NO: 858 - protein, 232 aa, Gossypium hirsutum
MTKLSQVNHKNSAQSGSVNNNISTSNDVTKVKKRTRRSFPRDSPPQRSSIYRGVTRHRWTGRYEAHLWDKNCWNESQNKKGRQVYLGAYDDEESAAHAYDLAALKYWGQDTILNFPVSTYQKELKEMENQSREEYIGSLRRKSSGFSRGVSKYRGVARHHHNGRWEARIGRVFGNKYLYLGTYATQEEAATAYDMAAIEYRGLNAVTNFDLSRYIKWLKPNPNPTLPPLTLI

SEQ ID NO: 859 - DNA, 864 bp, Glycine max
atggcgaagaaatcacagaaaagcctcaacagcactgggaagcgcacacgcaaaagcgtcccaagagactcacctccacaacgaagttcaatctataggggtgtcacaaggcatcgatggactggtcgatatgaggctcatttgtgggataagaattgctggaatgaatcacagagcaagaaaggaagacaaggggcatatgatgatgaagaagccgcagcacgtgcctatgacttggcagcattgaagtactggggccaagataccattctcaattttccattatcaaattatgaggaaaagctcaaggagatggagggccagtcaaaagaagaatatattggatccttgagaagaaaaagcagtggattctctcgaggagtttcaaaatacagaggcgtagcaagacaccaccataacggaagatgggaagctcgaattggaagggtctttggcaacaaatatctataccttggaacttacgctacacaagaagaagcagccgcagcatatgacatggcagcaatagaatacagaggacttaacgcggttacaaactttgacctgagccgttatatcaattggccacgtcctaaaacagaagaaaatcatcaaactattcctagcaatgaaaatgtaaactctaatgctgaacttgagctaggttcggctagtgatgagatcacagaagagggtgtagcaccatcttcagaatcaaatccttctcgtcgcacattccctgaagacattcaaacaatttttgaaaatcaagattcaggcatctacactgaaaatgatgatatcatttttggtgacctgggctcctttggtgcaccaatttttcattacgagcttgatgtttag

SEQ ID NO: 860 - protein, 287 aa, Glycine max
MAKKSQKSLNSTGKRTRKSVPRDSPPQRSSIYRGVTRHRWTGRYEAHLWDKNCWNESQSKKGRQGAYDDEEAAARAYDLAALKYWGQDTILNFPLSNYEEKLKEMEGQSKEEYIGSLRRKSSGFSRGVSKYRGVARHHHNGRWEARIGRVFGNKYLYLGTYATQEEAAAAYDMAAIEYRGLNAVTNFDLSRYINWPRPKTEENHQTIPSNENVNSNAELELGSASDEITEEGVAPSSESNPSRRTFPEDIQTIFENQDSGIYTENDDIIFGDLGSFGAPIFHYELDV

SEQ ID NO: 861 - DNA, 1053 bp, Glycine max
atggccaaaaaatcacagctgcgtacccagaaaaacaatgttaccaccaatgacgataataatcttaacgtaaccaacactgtgaccaccaaggtgaaacgaacaaggagaagtgtccctagagactccccacctcaacgcagctcaatataccgaggagtcactaggcaccgatggacaggccgatacgaagctcatttgtgggacaaacattgctggaatgaatcacagaacaaaaaagggcgacaaggcgcttatgacaatgaagaggcagcagcacatgcttatgatctagcagcactgaaatactggggtcaagataccattcttaattttccgttatcaaactacctgaacgaactgaaagaaatggagggtcaatcacgggaggagtatatcggatcgctgaggaggaaaagcagtggtttttctcggggaatttctaaatacagaggtgttgcaaggcatcatcataacggaaggtgggaggctcggattggcaaagtttttggcaataaatatctttacctcggaacttatgctacccaagaagaagctgctactgcctatgacctggcagccatagaataccgtggactcaatgctgtcaccaatttcgatctcagccgttacattaatattaatctcactaacataaacaataataataattgcactaacagcttcaccccaagtcctgatcaagaacaagaagctagcttcttccacaacaaagattcactcaataatactattgtagaagaagtcacgttggtgccacatcagcctcgtccagcgagtgccacgtcagcattggagcttctacttcagtcatcaaagttcaaggaaatgatggagatgacatctgtggccaatctttcatcaacacagatggaatctgagttgccacagtgcacatttcctgatcacattcagacgtactttgagtatgaagattccaatagatatgaggaaggagatgatctcatgttcaagttcaacgagttcagctccattgtgccgttttaccaatgtgacgagttcgagagttga

SEQ ID NO: 862 - protein, 350 aa, Glycine max
MAKKSQLRTQKNNVTTNDDNNLNVTNTVTTKVKRTRRSVPRDSPPQRSSIYRGVTRHRWTGRYEAHLWDKHCWNESQNKKGRQGAYDNEEAAAHAYDLAALKYWGQDTILNFPLSNYLNELKEMEGQSREEYIGSLRRKSSGFSRGISKYRGVARHHHNGRWEARIGKVFGNKYLYLGTYATQEEAATAYDLAAIEYRGLNAVTNFDLSRYININLTNINNNNNCTNSFTPSPDQEQEASFFHNKDSLNNTIVEEVTLVPHQPRPASATSALELLLQSSKFKEMMEMTSVANLSSTQMESELPQCTFPDHIQTYFEYEDSNRYEEGDDLMFKFNEFSSIVPFYQCDEFES

SEQ ID NO: 863 - DNA, 1071 bp, Medicago truncatula
atggcgaaaaaatcgcagaagcaaatagagaaagacgacaatgcaagcaatgataatgataatctgaatccaagtaacactgtcaccaccaaagcaaaacggacgaggaaaagtgtccctagaacttctccacctcaacgcagctcaatatacagaggagtcactaggcaccgttggacaggccgatatgaagctcatttgtgggacaagaattgttggaatgagtctcagaacaagaaagggagacaaggtgcttatgataatgaggagacggcagcacatgcttatgatctagcagcattgaaatattggggtcaagataccattattaattttccgctatcaaactatcagaaagaactaattgaaatggagagtcaatcaagggaggagtatattggatccttaagaaggaaaagcagtggtttttcacggggtgtatctaaatacagaggtgtagcaagacatcatcataacggaaggtgggaggcacggattggcaaagtttttggcaataagtatctttatctcggaacatatgctacccaagaagaagcagctacagcttatgacatggcagctattgaataccgtggacttaatgctgttaccaatttcgacctaagccgttatattaagtggcttaagcccaacaataacaacaatgacgacaataacaagtctaatattaatctttgtgacattaactctaacagtagtgccaacgactcaaactctaatgaagaattggaatttagcctcgtggacaatgaaatatcactcaataattctattgacgaagccacattggttcaacctcgaccaactagtgccacgtcagccctagagcttttgcttcaatcatctaagtttaaggaaatggtggaaatggcatcaatgacttccaatgtgtcaacgacgttggagtctgatcaattgtcacaatgtgcatttcctgatgacattcaaacgtactttgaatatgaaaatttcaatgatacaatgttggaagacctcaactccattatgcctacgtttcattatgactttgagggtgctgaggttttatag

SEQ ID NO: 864 - protein, 356 aa, Medicago truncatula
MAKKSQKQIEKDDNASNDNDNLNPSNTVTTKAKRTRKSVPRTSPPQRSSIYRGVTRHRWTGRYEAHLWDKNCWNESQNKKGRQGAYDNEETAAHAYDLAALKYWGQDTIINFPLSNYQKELIEMESQSREEYIGSLRRKSSGFSRGVSKYRGVARHHHNGRWEARIGKVFGNKYLYLGTYATQEEAATAYDMAAIEYRGLNAVTNFDLSRYIKWLKPNNNNNDDNNKSNINLCDINSNSSANDSNSNEELEFSLVDNEISLNNSIDEATLVQPRPTSATSALELLLQSSKFKEMVEMASMTSNVSTTLESDQLSQCAFPDDIQTYFEYENFNDTMLEDLNSIMPTFHYDFEGAEVL

SEQ ID NO: 865 - DNA, 978 bp, Ocimum basilicum
atggggagatcttgtaagcaaaagaagacaagtaatagtaataacgccgtcgacgtgggcgtaaataagagtacaaggactagaaagagcattcccagagaatctccgccgcagcgtagctccgtttacagaggtgtcactaggcaccgctggactggacgatacgaagctcacttgtgggataaaaactgctggaatgagacccaaaacaagaaagggaggcaagtgtatttaggggcctacgatgacgaagaagcagctgcacatgcatatgacttggctgcattgaagtattggggacaagatacagtccttaattttccactctcgacttatcaaaaacaactcgaggaaatggaaggtcaatcaaaggaagagtacatcagatcattgagaaggaaaagcagtggattttctcgtggtgtatcaaaatatcgaggcgtggcaagacaccatcataatggaagatgggaggcacgaattgggagagtcttcggcaataaatatctctaccttgggactttcgctacacaagaagaagcagcaactgcatacgacatggcagcgatcgagtatcgcggacttaacgccgttaccaattttgacctcagccgttacatcaagtgcttccctcctctccagaacaagtcgaaaaaccctaaaccgatcgctaacggcgtcaaagaatctaactccatgcaaaaccctaatcaagacataaatgaaggggaagtcactagccctactcaaactgccacgttggaggcttcggatgccacctcatcaaccctagggattctgttgcaaccttcaagtaagaacacgagtagtcctccaaggagcagtttccccgatgatattcaaacatcgttcgagattcgagattcgagcaactttgaagaggagcatgggattgtgtttggagagtatgattcattcgcctcgccaatgttccaatatgagctcgaaaccaattag

SEQ ID NO: 866 - protein, 325 aa, Ocimum basilicum
MGRSCKQKKTSNSNNAVDVGVNKSTRTRKSIPRESPPQRSSVYRGVTRHRWTGRYEAHLWDKNCWNETQNKKGRQVYLGAYDDEEAAAHAYDLAALKYWGQDTVLNFPLSTYQKQLEEMEGQSKEEYIRSLRRKSSGFSRGVSKYRGVARHHHNGRWEARIGRVFGNKYLYLGTFATQEEAATAYDMAAIEYRGLNAVTNFDLSRYIKCFPPLQNKSKNPKPIANGVKESNSMQNPNQDINEGEVTSPTQTATLEASDATSSTLGILLQPSSKNTSSPPRSSFPDDIQTSFEIRDSSNFEEEHGIVFGEYDSFASPMFQYELETN

SEQ ID NO: 867 - DNA, 1260 bp, Oryza sativa
atggccaagcgacgcagcaacggcgagaccgccgccgcgagcagcgacgactctagctccggcgtctgcggcggcggcggcggcggtgaggttgagccgaggcggcggcagaagcggccgcggaggagcgccccgcgggattgcccctcccagcgcagctccgcgttccgcggcgtcacacggcaccggtggacggggcggttcgaggcgcatctctgggacaagaacacctggaacgagtcgcagagcaagaagggcagacaagtttacctcggggcttacgacggcgaggaagcggcggcgcgcgcctacgacctcgccgcattgaagtactggggccacgacaccgtcctcaacttccctctgtcaacatatgacgaggaattgaaggaaatggaggggcagtccagggaagagtacatcggatcgctccggaggaagagcagtggcttctcaagaggggtgtccaagtacagaggagttgcaaggcatcatcacaacggcaaatgggaggctcggattgggcgtgtgttcggcaacaaatacctctacctaggtacttatgcaacacaagaggaggcggccgtggcgtacgacatcgcggcgatcgagcaccgcggcctcaacgccgtcaccaacttcgacatcaatctctacatcaggtggtaccacggctcttgccgctccagcagcgccgccgccgccaccaccatcgaagacgatgatttcgccgaagccatcgccgccgcgttgcaaggcgtcgacgagcagccgtcgtcgtcgccggcgacgacgcgccagctgcaaaccgcggacgacgacgacgacgacctcgtggcgcagctcccgccccagctgaggccgctggctcgcgcggcgtccacctccccgatcggactgctgctgcggtcgcccaagttcaaggagatcatcgagcaggcggcggccgcggcggcgtcgtcctctggtagcagcagtagcagcagcacagactcaccttcttcttcgtcgtcgtcatcgctgtcgccgtcgccattgccatcgccgccgccgcagcagcagccaaccgtaccgaaggacgaccagtacaacgtcgacatgtcgtcggtggcggcggcgaggtgcagcttcccggacgacgtgcagacgtacttcgggctggacgacgacggcttcgggtacccggaggtggacacgttcttgttcggggatttgggcgcgtacgcggcgcccatgtttcagttcgagctcgacgtctga

SEQ ID NO: 868 - protein, 419 aa, Oryza sativa
MAKRRSNGETAAASSDDSSSGVCGGGGGGEVEPRRRQKRPRRSAPRDCPSQRSSAFRGVTRHRWTGRFEAHLWDKNTWNESQSKKGRQVYLGAYDGEEAAARAYDLAALKYWGHDTVLNFPLSTYDEELKEMEGQSREEYIGSLRRKSSGFSRGVSKYRGVARHHHNGKWEARIGRVFGNKYLYLGTYATQEEAAVAYDIAAIEHRGLNAVTNFDINLYIRWYHGSCRSSSAAAATTIEDDDFAEAIAAALQGVDEQPSSSPATTRQLQTADDDDDDLVAQLPPQLRPLARAASTSPIGLLLRSPKFKEIIEQAAAAAASSSGSSSSSSTDSPSSSSSSSLSPSPLPSPPPQQQPTVPKDDQYNVDMSSVAAARCSFPDDVQTYFGLDDDGFGYPEVDTFLFGDLGAYAAPMFQFELDV

SEQ ID NO: 869 - DNA, 1140 bp, Oryza sativa
atggcgaagcctcgcaagaactccaccactaccaacaccagcagcagcggtgtcgccgccgccgccgccgcggcggcggtgaagccgaagcgcacgcggaagagcgtcccccgcgagtccccctcccagcgcagctccgtctaccgcggcgtcacccggcaccggtggacggggcggttcgaggcgcacctgtgggacaagaacagctggaacgagtcccagaacaagaagggcaagcaagtttacctcggggcgtatgacgacgaggaggcagcggcgagggcgtacgatctggcggcattgaagtactggggacccgacaccatcctcaacttcccgttgtctgcatatgaaggtgagttgaaagaaatggaggggcaatcaagggaagagtatattggatccctaaggaggaaaagcagtgggttctcaagaggagtatcgaagtaccgaggcgttgcaagacaccatcacaatgggagatgggaggcccggattggccgtgtttttggcaacaagtacctctatctcggtacttacgcgacgcaggaggaggcggcaatggcgtacgacatggcggccatcgagtatcggggcctgaacgccgtcaccaacttcgacctcagccggtacatcaagtggctccggcccggcgccgacggcgcgggcgctccccagaatcctcaccccatgctgggtgctctgtcggcgcaggatctcccggcgatcgacctcgacgccatggcgtcgtcgttccagcacgacggccatggcgccgcggcggcggcggcacagctgatcccggcaagacattcgctcggccacacgccgacaacgtcggcgctcagcctgctgctgcagtcgcccaagttcaaggagatgatcgagcggacgtcggcggcggagaccaccaccaccagcagcacaaccacctcctcctcgtccccgtcgccgccgcaggcgaccaaggacgacggcgcctcgccgcagtgcagcttcccggaggacatccagacctacttcggctgcgccgccgaggacggcgccgccggcgcgggatacgccgacgtggacggcctgttcttcggcgacctcgccgcgtacgcgtcgccggcgttccacttcgagctggacttgtga

SEQ ID NO: 870 - protein, 379 aa, Oryza sativa
MAKPRKNSTTTNTSSSGVAAAAAAAAVKPKRTRKSVPRESPSQRSSVYRGVTRHRWTGRFEAHLWDKNSWNESQNKKGKQVYLGAYDDEEAAARAYDLAALKYWGPDTILNFPLSAYEGELKEMEGQSREEYIGSLRRKSSGFSRGVSKYRGVARHHHNGRWEARIGRVFGNKYLYLGTYATQEEAAMAYDMAAIEYRGLNAVTNFDLSRYIKWLRPGADGAGAPQNPHPMLGALSAQDLPAIDLDAMASSFQHDGHGAAAAAAQLIPARHSLGHTPTTSALSLLLQSPKFKEMIERTSAAETTTTSSTTTSSSSPSPPQATKDDGASPQCSFPEDIQTYFGCAAEDGAAGAGYADVDGLFFGDLAAYASPAFHFELDL

SEQ ID NO: 871 - DNA, 828 bp, Populus trichocarpa
atgggaaaaacatcaaagcaaagcctaaagaactctgcaaacactagcattaatcccgcaaccaaggtgaagcggactagaaagagtgttcctcgagactctcctcctcaacgcagctccatctatagaggcgttacaaggcatcgatggaccggacgttatgaggctcatttgtgggataagaactgctggaatgagtcacagaacaagaaaggaagacaaggggcctacgatgacgaagaagcggctgggcatgcctatgacttggcagcattaaagtactggggacaggatactatcctcaattttcctctgtcaacttacgaagaagaattcaaagagatggagggtcattcgaaagaagaatatattggatcactgaggagaaaaagtagtgggttttcacgcggtgtgtccaaatatagaggtgtagccagacaccatcataatggaagatgggaagctcgaattggcagagttttcggcaacaagtacctctaccttggaacatatgccactcaagaagaagcagcaacagcatatgacatggcagctatagagtaccgtggacttaatgctgtgacaaactttgacctaagccgctactcctcaaagttcaaggaaatgttggagagaacatcagcttctgattgccctttgacaccacccgaatccgaccgcgatccgcctcgtaggagcttcccagatgacatccaaacttacttcgattgccaagactccagtagctacactgatggtgatgacattatttttggagacctacattcatttgcttcaccgatttttcattgcgaattggatgggtag

SEQ ID NO: 872 - protein, 275 aa, Populus trichocarpa
MGKTSKQSLKNSANTSINPATKVKRTRKSVPRDSPPQRSSIYRGVTRHRWTGRYEAHLWDKNCWNESQNKKGRQGAYDDEEAAGHAYDLAALKYWGQDTILNFPLSTYEEEFKEMEGHSKEEYIGSLRRKSSGFSRGVSKYRGVARHHHNGRWEARIGRVFGNKYLYLGTYATQEEAATAYDMAAIEYRGLNAVTNFDLSRYSSKFKEMLERTSASDCPLTPPESDRDPPRRSFPDDIQTYFDCQDSSSYTDGDDIIFGDLHSFASPIFHCELDG

SEQ ID NO: 873 - DNA, 726 bp, Ricinus communis
atggcgaagatctcacaacaaaggcaaaggaacaacagcaataacactaatactagtgcaaaaactggcaccaacccttcttcaaccaaggctaaacgaactagaaaaactgtccctagagactctcctcctcaacgtagctccatttacaggggtgttacaaggcatcgatggaccggacggtatgaggctcatttgtgggacaagaattgctggaatgaatcacaaaacaagaaaggaagacaagtatatctaggtgcatatgatgatgaagaagctgctgcacatgcctatgacttggcagcattaaagtactgggggcaagataccatccttaatttcccattgtcaacttatgaagaggagctcaaagagatggagggtcaatcaaaagaagagtatattggatccttgaggaggaagagcagtggtttctctcgtggggtgtccaaatatagaggtgttgcaagacaccatcataatggaagatgggaggctcgaattggaagagtttttggtaacaaatacctctaccttggaacatacgccactcaagaggaggcagctacagcttatgacatggcagctatagagtaccgtggacttaatgccgttacaaattttgaccttagccgttacatcaaatggctccgtcctaataaccctcaagaaaaccctacttctgatgctaatcctatgccaaccctactcaagatcttggattaa

SEQ ID NO: 874 - protein, 241 aa, Ricinus communis
MAKISQQRQRNNSNNTNTSAKTGTNPSSTKAKRTRKTVPRDSPPQRSSIYRGVTRHRWTGRYEAHLWDKNCWNESQNKKGRQVYLGAYDDEEAAAHAYDLAALKYWGQDTILNFPLSTYEEELKEMEGQSKEEYIGSLRRKSSGFSRGVSKYRGVARHHHNGRWEARIGRVFGNKYLYLGTYATQEEAATAYDMAAIEYRGLNAVTNFDLSRYIKWLRPNNPQENPTSDANPMPTLLKILD

SEQ ID NO: 875 - DNA, 1059 bp, Ricinus communis
atggcgaagatctcacaacaaaggcaaaggaacaacagcaataacactaatactagtgcaaaaactggcaccaacccttcttcaaccaaggctaaacgaactagaaaaactgtccctagagactctcctcctcaacgtagctccatttacaggggtgttacaaggcatcgatggaccggacggtatgaggctcatttgtgggacaagaattgctggaatgaatcacaaaacaagaaaggaagacaagtatatctaggtgcatatgatgatgaagaagctgctgcacatgcctatgacttggcagcattaaagtactgggggcaagataccatccttaatttcccattgtcaacttatgaagaggagctcaaagagatggagggtcaatcaaaagaagagtatattggatccttgaggaggaagagcagtggtttctctcgtggggtgtccaaatatagaggtgttgcaagacaccatcataatggaagatgggaggctcgaattggaagagtttttggtaacaaatacctctaccttggaacatacgccactcaagaggaggcagctacagcttatgacatggcagctatagagtaccgtggacttaatgccgttacaaattttgaccttagccgttacatcaaatggctccgtcctaataaccctcaagaaaaccctacttctgatgctaatcctatgccaaaccctactcaagatcttggattaactttcacagcccaccaccaaagctcaaccgccacagcggaaaccaccatgcctctgccaacatgtggtggcggaggcggtggctcggcttcatctgcattagggcttttgttgcagtcaacgaagttcaaggaaatgctagaaagaacatcagccaatgattgccctatgacaccacccgagtctgaaccgcctcgtcggagcttcccggatgacattcagactttcttcgattgtcaagacactggcagcttcacggagggtgatgacataatatttggagaactagatgcatttgcttcacctatttttcattgtgaacttaatgattag

SEQ ID NO: 876 - protein, 352 aa, Ricinus communis
MAKISQQRQRNNSNNTNTSAKTGTNPSSTKAKRTRKTVPRDSPPQRSSIYRGVTRHRWTGRYEAHLWDKNCWNESQNKKGRQVYLGAYDDEEAAAHAYDLAALKYWGQDTILNFPLSTYEEELKEMEGQSKEEYIGSLRRKSSGFSRGVSKYRGVARHHHNGRWEARIGRVFGNKYLYLGTYATQEEAATAYDMAAIEYRGLNAVTNFDLSRYIKWLRPNNPQENPTSDANPMPNPTQDLGLTFTAHHQSSTATAETTMPLPTCGGGGGGSASSALGLLLQSTKFKEMLERTSANDCPMTPPESEPPRRSFPDDIQTFFDCQDTGSFTEGDDIIFGELDAFASPIFHCELND

SEQ ID NO: 877 - DNA, 1197 bp, Sorghum bicolor
atggcgaagcctcgcaagaacagcgccgccgccaacaacaacaacagcagcagcaacggcgccggcgacctgacgccgcgcgcgaagccgaagcgcacgcggaagagcgtgccccgggagtcccccacgcagcgcagctccgtctaccgcggcgtcacacggcaccggtggacggggaggttcgaggctcacctgtgggacaagaacagctggaacgagtcccagaacaagaagggcaagcaagtttacctcggcgcgtacgacgacgaggaggcagcggcgcgggcgtatgacttggcggcattgaagtactggggccccgacaccatcctcaacttcccggcgtctgcatatgaaggagagatgaaaggaatggagggccagtccagggaagagtatattggatccttgaggaggaaaagcagtgggttctccagaggtgtctccaaataccgaggtgtcgcgagacatcaccacaacgggagatgggaggcgaggatcggtcgtgttttcggaaacaagtatctctacctcgggacttacgcgacgcaggaggaggcggcgatggcgtacgacatggcggcgatcgagtaccgtggcctgaacgccgtcacaaacttcgacctcagccgctacatcaagtggctccgcccgggcgccggcgggatggcagccgcggcggcggcggcgcagaacccgcacccgatgctgggcggcctggcgcagcagctgctgctgccgccgccggcggacaccaccaccaccgacggcgccggcgccgcggcgttccagcacgaccaccacggcgccgaggcgttcccgctgccgcccaggacgtcgctgggccacacgcccacgacgtcggcgctcagcctgctgctgcagtcgcccaagttcaaggagatgatccagcggaccgagagcggcaccaccaccactaccaccacgacatcgtcgttgtcctcgtcgccgccgcccacgccgtccccgtccccgccgcggcggtcgccagcgccgacgcagccgccggtgcaggcggcggccagggacgcctcgccgcaccagcgcggcttccccgaggacgtacagacattcttcggctgcgaggacaccgcgggcatcgacgtggaagccctcttctttggcgacctcgccgcgtacgcgacgccggcgttccacttcgagatggacttgtag

SEQ ID NO: 878 - protein, 398 aa, Sorghum bicolor
MAKPRKNSAAANNNNSSSNGAGDLTPRAKPKRTRKSVPRESPTQRSSVYRGVTRHRWTGRFEAHLWDKNSWNESQNKKGKQVYLGAYDDEEAAARAYDLAALKYWGPDTILNFPASAYEGEMKGMEGQSREEYIGSLRRKSSGFSRGVSKYRGVARHHHNGRWEARIGRVFGNKYLYLGTYATQEEAAMAYDMAAIEYRGLNAVTNFDLSRYIKWLRPGAGGMAAAAAAAQNPHPMLGGLAQQLLLPPPADTTTTDGAGAAAFQHDHHGAEAFPLPPRTSLGHTPTTSALSLLLQSPKFKEMIQRTESGTTTTTTTTSSLSSSPPPTPSPSPPRRSPAPTQPPVQAAARDASPHQRGFPEDVQTFFGCEDTAGIDVEALFFGDLAAYATPAFHFEMDL

SEQ ID NO: 879 - DNA, 1089 bp, Solanum tuberosum
atggcgaaaacatcaaaatcgaatactactgcaacttcatcatcttcttcatctagcaacaaatgtgatagtaaagcgaaacgtagcaacaaaattgatagcaatgctattggtaaagtgaaacgaacgcgaaagagcgttcctagagactctcctcctcaacgtagctcaatttacagaggagttactcggcaccgatggaccggccgatacgaagctcatctatgggataaaaattgctggaatgaaacacagaacaaaaaaggaagacaagtttatttgggagcctatgatgatgaagaagcagctgcacatgcatatgacttagcggcgttaaagtattggggtcaagacaccgtccttaatttccctgtagctacgtatgaaaatgagctaaaggaaatggaaggtcaatcaaaagaagagtatattggttctttgagaagaaaaagtagtgggttttcaaggggagtatcaaaatatagaggtgtagcaagacaccaccacaatggaagatgggaggctcgaattggaagggtatttggcaataaatatctctaccttggaacatatgctactcaagaggaagcagcaaccgcatatgatatggcagctattgaataccgtggactaaacgccgttacaaattttgaccttagccgttacattaaatggctacgtccctccgaccaaacaaatgataataccattaataaccctgaaccaaaccctaaccctattgacattcatctcatgcctacaaatttaacccaacaacaaagctccggctgcgatgtaactgttgcggctccgccacctggatgtggcggagccgcgacttcatcagcagcactagaacttttgatgcagtctacaaagttcaaggaaatgctcgaaagaacatcggaggtaattgaatgcccggaaactccaccggagccagaccgaccacggaggagcttccctgatgatatacaaacctattttgattgccaagaatcaagtagcttcattgaggagcatgatattatttttggtgacttggattctttaacattgccaatgtttcagtgtgagcttattaattaa

SEQ ID NO: 880 - protein, 362 aa, Solanum tuberosum
MAKTSKSNTTATSSSSSSSNKCDSKAKRSNKIDSNAIGKVKRTRKSVPRDSPPQRSSIYRGVTRHRWTGRYEAHLWDKNCWNETQNKKGRQVYLGAYDDEEAAAHAYDLAALKYWGQDTVLNFPVATYENELKEMEGQSKEEYIGSLRRKSSGFSRGVSKYRGVARHHHNGRWEARIGRVFGNKYLYLGTYATQEEAATAYDMAAIEYRGLNAVTNFDLSRYIKWLRPSDQTNDNTINNPEPNPNPIDIHLMPTNLTQQQSSGCDVTVAAPPPGCGGAATSSAALELLMQSTKFKEMLERTSEVIECPETPPEPDRPRRSFPDDIQTYFDCQESSSFIEEHDIIFGDLDSLTLPMFQCELIN

SEQ ID NO: 881 - DNA, 1068 bp, Triphysaria sp.
atggccaaatcttcagaacaaaataatagcttggccaccagcacagcggccgaggctcccgttgttattaaaaaggcgaaacgaacacgaaaaagcattccaagagagtctccaagacgacgtagctcaatcttcaggggtgtcacaaggcaccgatggacgggtcgttatgaagctcatctgtgggataagaatagctggaatgagtcacaaagcaagaaaggaagacaagtgtatttaggagcgtatgatgaggaagaagcggctgcacgtgcttatgacttggcagcattgaagtactggggacaggacacaatcctaaatttcccactatccagctatgaagaggagcttaatgaaatggagggtcagtcaaaggaagagtatattggttcattaagaggaaaaagcagtggcttttctcgtggagtatcaaaatacagaggcgtggtaaggcatcatcataatggtagatgggaagctcggattggcagggtttttggcaacaaatacctctaccttggaacatatgcaactcaagaagaagcggcgagggcatacgacatggccgccgttaagtaccgcggacataatgcggtaaccaatttcgacctcagtcgttatgccgagtggctcgggcctcttagccacaactccgacaaccctcagctaacccctaggggtaatatggacattaataacacatttcaagatgcaagtcaagaaattgggttgacttttctcggtcaacagcccgaaagtccaatcttggctgattccacctccccttcgccaccacatcttagtgacggcgccaccgcttcttcagccctaggcgttttgctaaactcctatatgtttaaggaaatgatggaccaaagggtggtagcgagcccatctagcccgtccgagcctgagcccaagcccggacctcaacgaagcagtttcccagatgatatacaaacatcttttgagtttcaagattcatttgtggaggaacatgacgtcatctttggtaactatgattcatttgtgtcgtcagcgttccaatgtgggcttgacgcttga

SEQ ID NO: 882 - protein, 355 aa, Triphysaria sp.
MAKSSEQNNSLATSTAAEAPVVIKKAKRTRKSIPRESPRRRSSIFRGVTRHRWTGRYEAHLWDKNSWNESQSKKGRQVYLGAYDEEEAAARAYDLAALKYWGQDTILNFPLSSYEEELNEMEGQSKEEYIGSLRGKSSGFSRGVSKYRGVVRHHHNGRWEARIGRVFGNKYLYLGTYATQEEAARAYDMAAVKYRGHNAVTNFDLSRYAEWLGPLSHNSDNPQLTPRGNMDINNTFQDASQEIGLTFLGQQPESPILADSTSPSPPHLSDGATASSALGVLLNSYMFKEMMDQRVVASPSSPSEPEPKPGPQRSSFPDDIQTSFEFQDSFVEEHDVIFGNYDSFVSSAFQCGLDA

SEQ ID NO: 883 - DNA, 1053 bp, Vitis vinifera
atggcgaagctatcacagcaaaaccataagaatagtgcaaacagcaatgctactaatactactctctctgtgacaaaggtgaagcggactcgcaaaactgtccccagagactctcctcctcagcggagctcgatatatcggggcgtcacgaggcatcggtggactggccgatacgaggctcatttgtgggataagaactgctggaatgaatcacagaacaagaaaggaagacaagtttatctcggtgcctaccatgatgaagaagccgcagcacatgcttatgacttggcagctctcaaatactggggtccagaaaccattctcaattttccgctatcaacatatgaaaaggagttgaaggaaatggagggtctgtcaagagaagaatacattggatccttgagaagaagaagcagcggtttttctcgaggtgtttcaaaatatagaggggttgcaagacatcatcacaatggcagatgggaagcgcggattggcagagtgttcggcaacaaatacctctatcttggcacatatgctactcaggaggaggcagcgactgcatatgatatggctgccatagagtatcgcggtcttaacgcggttaccaactttgatctcagtcgctacatcaaatggttaaagcctaatcaaaataacccatgcgaacagcccaataaccctaaccttgactctaatttgactccaaaccctaatcatgattttggaatcagcttcctgaatcacccacagacttctggtactgctgcctgcagtgaacctccattgactcagaccaggcctcccattgcctcatcggcgcttggccttctacttcagtcctcaaagttcaaagagatgatggagatgacaactgccgccgaccacctatcgacaccgcctgagtctgagctgccacggtgcagcttccctgacgacattcagacgtacttcgagtgccaggattccggcagttacgaggaaggagacgatgttatcttcagtgagctcaactcgttcatacctcccatgttccaatgtgatttcagtgcttaa

SEQ ID NO: 884 - protein, 350 aa, Vitis vinifera
MAKLSQQNHKNSANSNATNTTLSVTKVKRTRKTVPRDSPPQRSSIYRGVTRHRWTGRYEAHLWDKNCWNESQNKKGRQVYLGAYHDEEAAAHAYDLAALKYWGPETILNFPLSTYEKELKEMEGLSREEYIGSLRRRSSGFSRGVSKYRGVARHHHNGRWEARIGRVFGNKYLYLGTYATQEEAATAYDMAAIEYRGLNAVTNFDLSRYIKWLKPNQNNPCEQPNNPNLDSNLTPNPNHDFGISFLNHPQTSGTAACSEPPLTQTRPPIASSALGLLLQSSKFKEMMEMTTAADHLSTPPESELPRCSFPDDIQTYFECQDSGSYEEGDDVIFSELNSFIPPMFQCDFSA

SEQ ID NO: 885 - DNA, 1191 bp, Zea mays
atggcgaggcctcgcaagaacagcgccgccgccgccaacaacaacaacagcaacaccaccaacgccggcaacgccgccgtcgacctcgcggcgcgcgtcaagccgaagcgcacgcggaagagcgtgccccgggagtccccctcgcagcgcagctccgtctaccgcggcgtcacacggcaccggtggacggggaggttcgaggctcacctgtgggacaagaacagctggaacgagtcccagaacaagaagggcaagcaagtttacctcggcgcgtacgacgacgaggacgcagcggcgcgcgcgtatgacttggcggcattgaagtactggggccccgacaccatcctcaacttcccggcgtctgcatatgaagcagagttgaaagaaatggaggggcagtccagggaagagtatattgggtccttaaggaggaaaagcagtgggttctccagaggtgtttccaaataccgaggtgtcgcaaggcatcaccacaacgggagatgggaggcgaggattggtcgcgtcttcggaaacaagtatctctacctcgggacttacgggacgcaggaggaggcggcgatggcgtacgacatggcggcgatcgagtaccggggcctgaacgccgtcactaacttcgacctcagccgctacatcaagtggctccgcccgggcgccggcgccgcgcagaacccgcacccgatgctggacggcctggcgcagcagctgctgctgtcgccggagggcaccatcgacggcgccgcgttccaccagcagcagcacgaccaccgccagcagggcgccgccgagctcccgctgccgcccagggcgtcgctgggccacacgcccaccacgtcggcgctcggcctgctgctgcagtcgtccaagttcaaggagatgatccagcgggcgtcggcggccgagagcggcaccaccaccgtcaccaccacgtcgtcgtcgtcgtcgcagccgcccacgccgacgccgacgccgtcgccatcgccacctccgacgccgccagtgcagccggccagggacgcctcgccacagtgcagcttccccgaggacatacagacctttttcggctgcgaggacgtcgcgggcgtcggcgccggcgtcgacgtggacgccctcttttttggcgacctcgccgcgtacgcgtcgccggcgttccacttcgagatggacttgtag

SEQ ID NO: 886 - protein, 396 aa, Zea mays
MARPRKNSAAAANNNNSNTTNAGNAAVDLAARVKPKRTRKSVPRESPSQRSSVYRGVTRHRWTGRFEAHLWDKNSWNESQNKKGKQVYLGAYDDEDAAARAYDLAALKYWGPDTILNFPASAYEAELKEMEGQSREEYIGSLRRKSSGFSRGVSKYRGVARHHHNGRWEARIGRVFGNKYLYLGTYGTQEEAAMAYDMAAIEYRGLNAVTNFDLSRYIKWLRPGAGAAQNPHPMLDGLAQQLLLSPEGTIDGAAFHQQQHDHRQQGAAELPLPPRASLGHTPTTSALGLLLQSSKFKEMIQRASAAESGTTTVTTTSSSSSQPPTPTPTPSPSPPPTPPVQPARDASPQCSFPEDIQTFFGCEDVAGVGAGVDVDALFFGDLAAYASPAFHFEMDL

SEQ ID NO: 887 - DNA, 52 bp, Artificial sequence
  primer 1
ggggacaagtttgtacaaaaaagcaggcttaaacaatggcgaaaaaatcgca

SEQ ID NO: 888 - DNA, 52 bp, Artificial sequence
  primer 2
ggggaccactttgtacaagaaagctgggtccatattctcttttgaattgagc

SEQ ID NO: 889 - DNA, 2194 bp, Oryza sativa; identical to SEQ ID NO: 289

SEQ ID NO: 890 - protein, 50 aa, Artificial sequence
  motif 43
  VARIANT (8)..(8): / replace = "Gly"
  VARIANT (50)..(50): / replace = "Phe"
EYIGSLRRKSSGFSRGVSKYRGVARHHHDGRWEARIGKVFGNKYLYLGTY

SEQ ID NO: 891 - protein, 50 aa, Artificial sequence
  motif 44
RKSVPRDSPPQRSSIYRGVTRHRWTGRYEAHLWDKNCWNESQNKKGRQVY

SEQ ID NO: 892 - protein, 41 aa, Artificial sequence
  motif 45
  VARIANT (3)..(3): / replace = "Asn"
  VARIANT (9)..(9): / replace = "His"
  VARIANT (21)..(21): / replace = "His"
  VARIANT (31)..(31): / replace = "Thr"
  VARIANT (37)..(37): / replace = "Val"
YDDEEAAARAYDLAALKYWGQDTILNFPLSNYEEELKEMEG

SEQ ID NO: 893 - protein, 41 aa, Artificial sequence
  motif 46
  VARIANT (8)..(8): / replace = "Gln"
  VARIANT (12)..(12): / replace = "Arg"
  VARIANT (30)..(30): / replace = "Lys"
ATQEEAATAYDMAAIEYRGLNAVTNFDLSRYIKWLRPNNNQ

SEQ ID NO: 894 - protein, 21 aa, Artificial sequence
  motif 47
  VARIANT (1)..(1): / replace = "Glu"
  VARIANT (4)..(4): / replace = "Pro"
  VARIANT (5)..(5): / replace = "Asn"
  VARIANT (6)..(6): / replace = "Thr" / replace = "Gln"
  VARIANT (7)..(7): / replace = "Thr" / replace = "Arg"
  VARIANT (8)..(8): / replace = "Thr"
  VARIANT (9)..(9): / replace = "Asn"
  VARIANT (11)..(11): / replace = "Asn"
  VARIANT (12)..(12): / replace = "Asn"
  VARIANT (13)..(13): / replace = "Asn"
  VARIANT (14)..(14): / replace = "Asn"
  VARIANT (16)..(16): / replace = "Val"
  VARIANT (17)..(17): / replace = "Thr"
  VARIANT (18)..(18): / replace = "Thr"
  VARIANT (19)..(19): / replace = "Lys"
  VARIANT (20)..(20): / replace = "Gln"
  VARIANT (21)..(21): / replace = "Lys"
QSQKPRCSFPDDIQTYFECTD

SEQ ID NO: 895 - protein, 10 aa, Artificial sequence
  motif 48
  VARIANT (3)..(3): / replace = "Pro"
  VARIANT (8)..(8): / replace = "Thr"
  VARIANT (9)..(9): / replace = "Val"
QSSKFKEMLE

SEQ ID NO: 896 - DNA, 11 bp, Artificial sequence
  GCC-box
taagagccgcc

SEQ ID NO: 897 - protein, 74 aa, Artificial sequence
  AP2 consensus domain
  UNSURE (1)..(1): Xaa can be any amino acid
  UNSURE (2)..(2): Xaa can be Phe, His, Trp or Tyr
  UNSURE (3)..(3): Xaa can be His, Lys or Arg
  UNSURE (6)..(6): Xaa can be Cys, Asp, Glu, His, Lys, Asn, Gln, Arg, Ser or Thr
  UNSURE (7)..(7): Xaa can be any amino acid
  UNSURE (8)..(8): Xaa can be His, Lys or Arg
  UNSURE (9)..(9): Xaa can be any amino acid
  UNSURE (10)..(10): Xaa can be Ala, Cys, Phe, Gly, His, Ile, Lys, Leu, Met, Arg, Thr, Val, Trp or Tyr
  UNSURE (12)..(12): Xaa can be any amino acid
  UNSURE (13)..(13): Xaa can be His, Lys or Arg
  UNSURE (15)..(15): Xaa can be any amino acid
  UNSURE (16)..(16): Xaa can be Ala, Gly or Ser
  UNSURE (17)..(17): Xaa can be Asp, Glu, His, Lys or Arg
  misc_feature (18)..(18): Xaa can be any naturally occurring amino acid
  UNSURE (19)..(19): Xaa can be Ala, Cys, Asp, Glu, Gly, His, Lys, Asn, Gln, Arg, Ser or Thr
  UNSURE (20)..(20): Xaa can be Asp, Glu, His, Lys or Arg
  UNSURE (21)..(21): Xaa can be Ala, Cys, Asp, Gly, Asn, Pro, Ser, Thr or Val
  UNSURE (22)..(31): Xaa can be any amino acid
  UNSURE (32)..(33): Xaa can be Ala, Cys, Asp, Glu, Gly, His, Lys, Asn, Gln, Arg, Ser or Thr
  UNSURE (34)..(34): Xaa can be Asp, Glu, His, Lys or Arg
  UNSURE (35)..(35): Xaa can be Ile, Leu or Val
  UNSURE (36)..(36): Xaa can be Phe, His, Trp or Tyr
  UNSURE (39)..(39): Xaa can be Ser or Thr
  UNSURE (41)..(41): Xaa can be Ala, Cys, Asp, Gly, Asn, Pro, Ser, Thr or Val
  UNSURE (42)..(42): Xaa can be Ser or Thr
  UNSURE (43)..(43): Xaa can be Ala, Cys, Asp, Glu, Gly, His, Lys, Asn, Gln, Arg, Ser or Thr
  UNSURE (44)..(44): Xaa can bee Asp or Glu
  UNSURE (45)..(45): Xaa can be Ala, Cys, Asp, Glu, Gly, His, Lys, Asn, Gln, Arg, Ser or Thr
  UNSURE (48)..(48): Xaa can be Ala, Cys, Phe, Gly, His, Ile, Lys, Leu, Met, Arg, Thr, Val, Trp or Tyr
  UNSURE (52)..(52): Xaa can be any amino acid
  UNSURE (55)..(58): Xaa can be Ala, Cys, Phe, Gly, His, Ile, Lys, Leu, Met, Arg, Thr, Val, Trp or Tyr
  UNSURE (60)..(61): Xaa can be any amino acid
  UNSURE (62)..(62): Xaa can be Cys, Asp, Glu, His, Lys, Asn, Gln, Arg, Ser or Thr
  UNSURE (64)..(65): Xaa can be Ala, Cys, Phe, Gly, His, Ile, Lys, Leu, Met, Arg, Thr, Val, Trp or Tyr
  UNSURE (68)..(68): Xaa can be Ala, Cys, Asp, Gly, Asn, Pro, Ser, Thr or Val
  UNSURE (69)..(72): Xaa can be any amino acid
  UNSURE (73)..(74): Xaa can be Ala, Cys, Asp, Glu, Gly, His, Lys, Asn, Gln, Arg, Ser or Thr
XXXGVXXXXXGXXWXXXXXXXXXXXXXXXXXXXXXXLGXFXXXXXAAHAYDXAAXXXXGXXXAXXNFXXXXXXX

1-128. (canceled)

129. A method for enhancing yield-related traits in plants relative to control plants, comprising modulating expression in a plant of a nucleic acid encoding one of:
(a) a FSM1-like polypeptide, wherein said FSM1-like polypeptide comprises a SANT domain (SMART accession SM0017);
(b) a PIF3-like polypeptide, wherein said PIF3-like polypeptide comprises a Helix-Loop-Helix domain (PF00010);
(c) a polypeptide having uroporphyrinogen III decarboxylase activity (UROD);
(d) an AS-MTT polypeptide, wherein said AS-MTT polypeptide comprises a DUF1664 domain;
(e) an EXO-1 polypeptide, wherein said EXO-1 polypeptide comprises at least one of the following domains: XPG_N with accession number PF00752, XPG_{—}1 with accession number PF00867, or EXONUCLEASE 1 domain with accession number PTHR11081:SF8; or
(f) a YiAP2 polypeptide or a portion thereof.

130. The method of claim 129, wherein
(a) the FSM1-like polypeptide comprises one or more of the following motifs:
(i)
(SEQ ID NO: 283)
Motif I: W[TS][PA]K[QE]NK[LA]FE[RK]ALAVYD[KR][DE]
TPDRW[HSQ]N[VI]A[RK]A
(ii)
(SEQ ID NO: 284)
Motif 2: GGK[ST][AV][ED]EV[KR]RHYE[IL]L,
(iii)
(SEQ ID NO: 285)
Motif 3: D[VL][KF][HF]I[ED][SN]G[RM]VPFP[NK]Y;
(b) the PIF3-like polypeptide comprises one or more of motifs 7 to 12 (SEQ ID NO: 358 to SEQ ID NO: 363);
(c) the UROD polypeptide comprises any one or more of Motifs 13 to 30;
(d) the AS-MTT polypeptide comprises one or more of the following motifs:
(i)
(SEQ ID NO: 648)
Motif 31: G[WL][SK][FL]SD[LV]M[YF][VA]T[KR]R[NS][ML][AS]
[ND]AV[SA][SN][VL][TS]K[QH]L[ED][QN]VS[ESD][AS]LAA[TA]K[RK]HL[TS]QR,
(ii)
(SEQ ID NO: 649)
Motif 32: AA[AT][VL]G[AV][VLM]GY[GC]YMWWK,
(iii)
(SEQ ID NO: 650)
Motif 33: GAG[LY]TG[ST][IV][LV][LA][KR][NE]G[KR]L;
(e) the EXO-1 polypeptide comprises one or more of the following motifs:
(i)
(SEQ ID NO: 664)
Motif 40: G[QKC][RT]VA[VI]D[TA]YSWLH[KR][GA]A[YL]SC[SA]R
ELC[KFL]GLPT,
(ii)
(SEQ ID NO: 665)
Motif 41: Y[CF]M[HK]RVN[LM]L[RL]H[YH][GK][VI]KP[IV][LV]VF
DGGRLPMK[AS][DE][QTE]ENKR[AR]R[SK]RKENL[EA]RA[KR]E[ELW],
(iii)
(SEQ ID NO: 666)
Motif 42: V[DQA]A[VI]ITEDSDL[IL][AP][FY]GC[PK]R[IV][IF]FK
[ML]D[KR][FYN]GQG;
or
(f) the YiAP2 polypeptide comprises at least two AP2 domains and one or more motifs having at least 50%, 51%, 52%, 53%, 54%, 55%, 56%, 57%, 58%, 59%, 60%, 61%, 62%, 63%, 64%, 65%, 66%, 67%, 68%, 69%, 70%, 71%, 72%, 73%, 74%, 75%, 76%, 77%, 78%, 79%, 80%, 81%, 82%, 83%, 84%, 85%, 86%, 87%, 88%, 89%, 90%, 91%, 92%, 93%, 94%, 95%, 96%, 97%, 98%, 99% or 100% sequence identity to any one of the following motifs:
(i) Motif 43 as represented by SEQ ID NO: 890,
(ii) Motif 44 as represented by SEQ ID NO: 891,
(iii) Motif 45 as represented by SEQ ID NO: 892,
(iv) Motif 46 as represented by SEQ ID NO: 893,
(v) Motif 47 as represented by SEQ ID NO: 894,
(vi) Motif 48 as represented by SEQ ID NO: 895.

131. The method of claim 129, wherein the modulated expression is effected by introducing and expressing in a plant a nucleic acid encoding the FSM1-like polypeptide, the PIF3-like polypeptide, the UROD polypeptide, the AS-MTT polypeptide, the EXO-1 polypeptide, or the YiAP2 polypeptide.

132. The method of claim 131, wherein
(a) the nucleic acid encoding the FSM1-like polypeptide encodes any one of the proteins listed in Table A1 or is a portion of said nucleic acid, or a nucleic acid capable of hybridizing with said nucleic acid;
(b) the nucleic acid encoding the PIF3-like polypeptide encodes any one of the proteins listed in Table A2 or is a portion of said nucleic acid, or a nucleic acid capable of hybridizing with said nucleic acid;
(c) the nucleic acid encoding the UROD polypeptide encodes any one of the proteins listed in Table A3 or is a portion of said nucleic acid, or a nucleic acid capable of hybridizing with said nucleic acid;
(d) the nucleic acid encoding the AS-MTT polypeptide encodes any one of the proteins listed in Table A4 or is a portion of said nucleic acid, or a nucleic acid capable of hybridizing with said nucleic acid;
(e) the nucleic acid encoding the EXO-1 polypeptide encodes any one of the proteins listed in Table A5 or is a portion of said nucleic acid, or a nucleic acid capable of hybridizing with said nucleic acid; or
(f) the nucleic acid encoding the YiAP2 polypeptide encodes any one of the proteins listed in Table A6 or is a portion of said nucleic acid, or a nucleic acid capable of hybridizing with said nucleic acid.

133. The method of claim 131, wherein the nucleic acid sequence encodes an orthologue or paralogue of any of the proteins given in any one of Tables A1, A2, A3 A4, A5, and A6.

134. The method of claim 129, wherein the enhanced yield-related traits comprise one or more of: increased early vigour, increased yield, increased biomass, and increased seed yield relative to control plants.

135. The method of claim 129, wherein the enhanced yield-related traits are obtained under non-stress conditions, under conditions of drought stress, under conditions of salt stress, or under conditions of nitrogen deficiency.

136. The method of claim 131, wherein the nucleic acid is operably linked to a constitutive promoter, a GOS2 promoter, or a GOS2 promoter from rice.

137. The method of claim 131, wherein the nucleic acid encoding the YiAP2 polypeptide is operably linked to a shoot-specific promoter, a beta expansin promoter, or an EXPB9 promoter from rice.

138. The method of claim 131, wherein
(a) the nucleic acid encoding the FSM1-like polypeptide is of plant origin, from a dicotyledonous plant, from the family Solanaceae, from the genus Lycopersicon, or from Solanum lycopersicum;
(b) the nucleic acid encoding the PIF3-like polypeptide is of plant origin, from a dicotyledonous plant, from the family Poaceae, from the genus Oryza, or from Oryza sativa;
(c) the nucleic acid encoding the AS-MTT polypeptide is of plant origin, from a dicotyledonous plant, from the genus Populus, or from Populus trichocarpa;
(d) the nucleic acid encoding the EXO-1 polypeptide is of plant origin, from a dicotyledonous plant, from the family Salicaceae, from the genus Populus, or from Populus trichocarpa;
(e) the nucleic acid encoding the UROD polypeptide is of plant origin, from the family Salicaceae, from the genus Populus, or from Populus trichocarpa; or
(f) the nucleic acid encoding the YiAP2 polypeptide is of plant origin, from a dicotyledonous plant, from the genus Medicago, or from Medicago truncatula.

139. A plant or part thereof, including seeds, obtained by the method of claim 129, wherein said plant or part thereof comprises
(a) a recombinant nucleic acid encoding the FSM1-like polypeptide;
(b) a recombinant nucleic acid encoding the PIF3-like polypeptide;
(c) a recombinant nucleic acid encoding the UROD polypeptide;
(d) a recombinant nucleic acid encoding the AS-MTT polypeptide;
(e) a recombinant nucleic acid encoding the EXO-1 polypeptide; or
(f) a recombinant nucleic acid encoding the YiAP2 polypeptide.

140. A construct comprising:
(i) a nucleic acid encoding the polypeptide as defined in claim 129;
(ii) one or more control sequences capable of driving expression of the nucleic acid sequence of (a); and optionally
(iii) a transcription termination sequence.

141. The construct of claim 140, wherein one of the control sequences is a constitutive promoter, a GOS2 promoter, a GOS2 promoter from rice, a shoot-specific promoter, a beta expansin promoter, or an EXPB9 promoter from rice.

142. A method for making plants having increased yield, particularly increased biomass and/or increased seed yield, relative to a control plant, comprising utilizing the construct of claim 140.

143. A plant, plant part or plant cell transformed with the construct of claim 140.

144. A method for the production of a transgenic plant having increased yield, particularly increased biomass and/or increased seed yield, relative to a control plant, comprising:
(i) introducing and expressing in a plant a nucleic acid encoding the polypeptide as defined in claim 129; and
(ii) cultivating the plant under conditions promoting plant growth and development.

145. A transgenic plant having increased yield, particularly increased biomass and/or increased seed yield, relative to a control plant, resulting from modulated expression of a nucleic acid encoding the polypeptide as defined in claim 129, or a transgenic plant cell derived from said transgenic plant.

146. The transgenic plant of claim 139, or a transgenic plant cell derived thereof, wherein said plant is a crop plant such as sugar beet, or a monocot plant such as sugarcane, or a cereal, such as rice, maize, wheat, barley, millet, rye, triticale, sorghum, emmer, spelt, secale, einkom, teff, milo and oats.

147. Harvestable parts of the plant of claim 146, wherein said harvestable parts are preferably shoot biomass and/or seeds.

148. Products derived from the plant of claim 146 and/or from harvestable parts of said plant.

149. A method for increasing yield, particularly in increasing seed yield and/or shoot biomass in a plant relative to a control plant, comprising utilizing a nucleic acid encoding the polypeptide as defined in claim 129.
